(19) United States
(12) Patent Application Publication
(10) Pub. No.: US 2014/0271457 A1
(43) Pub. Date: Sep. 18, 2014

(54) Dual Specific Binding Proteins Directed Against TNF

(71) Applicant: ABBVIE INC., NORTH CHICAGO, IL (US)

(72) Inventors: Tariq Ghayur, Holliston, MA (US); Carrie Goodreau, Ludlow, MA (US)

(73) Assignee: ABBVIE INC., NORTH CHICAGO, IL (US)

(21) Appl. No.: 14/211,596

(22) Filed: Mar. 14, 2014

Related U.S. Application Data
(60) Provisional application No. 61/794,964, filed on Mar. 15, 2013.

(51) Int. Cl. C07K 16/46; A61K 45/06; G01N 33/68; A61K 47/48

(52) U.S. Cl. CPC C07K 16/468; A61K 47/48676; A61K 45/06; G01N 33/6869; G01N 33/6863
USPC 424/1.11; 530/387.3; 530/391.3; 530/391.7; 435/188; 536/23.4; 435/320.1; 435/328; 435/252.33; 435/258.1; 435/419; 435/254.11; 435/254.2; 435/69.6; 424/136.1; 436/501; 435/7.92

(57) ABSTRACT

Engineered multivalent and multispecific binding proteins that bind TNFα and IL-13, TNFα and PGE2, or TNFα and NGF are provided, along with methods of making and uses in the prevention, diagnosis, and/or treatment of disease.

### FIELD

[0001] Multivalent and multispecific binding proteins that bind TNFα and IL-13, TNFα and PGE2, or TNFα and NGF, methods of making, and their uses in the diagnosis, prevention, and/or treatment of acute and chronic inflammatory diseases, cancer, and other diseases are provided.

### BACKGROUND

[0002] Engineered proteins, such as multispecific binding proteins capable of binding two or more antigens, are known in the art. Such multispecific binding proteins can be generated using cell fusion, chemical conjugation, or recombinant DNA techniques. There are a variety of multispecific binding protein structures known in the art and many structures and methods have distinct disadvantages.

[0003] Bispecific antibodies have been produced using quadroma technology. However, the presence of mis-paired by-products and significantly reduced production yields with this technology means that sophisticated purification procedures are required. Bispecific antibodies can also be produced by chemical conjugation of two different mAbs. However, this approach does not yield homogeneous preparations.

[0004] Other approaches used previously include coupling of two parental antibodies with a hetero-bifunctional crosslinker, production of tandem single-chain Fv molecules, diabodies, bispecific diabodies, single-chain diabodies, and di-diabodies. However, each of these approaches have disadvantages. In addition, a multivalent antibody construct comprising two Fab repeats in the heavy chain of an IgG and capable of binding four antigen molecules has been described (see PCT Publication No. WO 0177342 and Miller et al. (2003) J. Immunol. 170(9): 4854-61).

[0005] U.S. Pat. No. 7,612,181 (incorporated herein by reference in its entirety) provides a novel family of binding proteins capable of binding two or more antigens with high affinity, which are called dual variable domain binding proteins (DVD binding protein) or dual variable domain immunoglobulins (DVD-Ig™). DVDs molecules are tetravalent dual-specific Ig-like proteins capable of binding two distinct epitopes on the same molecule or two different molecules simultaneously. DVDs are unique binding proteins comprised of two variable domains fused to the N-terminus of a bivalent antibody. The variable domains may be directly fused to one another or connected via synthetic peptide linkers of assorted length and amino acid composition. DVDs can be engineered with intact and functional Fc domains, allowing then to mediate appropriate effector functions. DVD format, due to its flexibility of choice of antibody pair, orientation of two antigen-binding domains and the length of the linker that joins them, may provide for novel therapeutic modalities.

[0006] While a variety of structures are provided in the art, some with advantages and disadvantages, specific constructs are required for preparing multivalent binding proteins with specific properties and which bind to specific targets. Additionally, new variable domain sequences can further improve the properties of the binding proteins. Accordingly, disclosed herein are dual variable domain immunoglobulins using the binding protein framework disclosed in U.S. Pat. No. 7,612,181 (incorporated herein by reference in its entirety) and containing particular first and second polypeptide chains, each comprising first and second variable domain sequences (e.g., those listed in Table 1) that form functional binding sites for the binding targets such as TNF-α, IL-13, PGE2, and NGF. In some embodiments, the first and second polypeptide chains comprise first and second variable domain sequences that each contain the three CDRs from one of the sequences listed in Table 1 and form functional binding sites for binding targets such as TNF-α, IL-13, PGE2, and NGF.

[0007] TNF-α plays a role in the pathology associated with a variety of diseases involving immune and inflammatory elements, such as autoimmune diseases, particularly those associated with inflammation, including Crohn's disease, psoriasis (including plaque psoriasis), arthritis (including rheumatoid arthritis, psoratic arthritis, osteoarthritis, or juvenile idiopathic arthritis), multiple sclerosis, systemic lupus erythematosus, and ankylosing spondylitis.

[0008] Interleukin 13 (IL-13) is a 17-kDa glycoprotein produced by activated T cells of the Th2 lineage. The function of IL-13 includes immunoglobulin isotype switching to IgE in human B cells and suppressing inflammatory cytokine production. IL-13 is associated primarily with the induction of airway inflammation such as asthma. It has also been linked to other allergic diseases, fibrotic conditions, cancer and infectious diseases

[0009] There is a need in the art for improved multivalent binding proteins capable of binding TNFα and IL-13, TNFα and PGE2, or TNFα and NGF. Novel binding proteins that bind TNFα and IL-13, TNFα and PGE2, or TNFα and NGF are provided herein.

[0010] In some embodiments, a binding protein is disclosed comprising first and second polypeptide chains, each independently comprising VD1-(X1)n-VD2-C-(X2)n, wherein: VD1 is a first variable domain; VD2 is a second variable domain; C is a constant domain; X1 is a linker with the proviso that it is not CH1; X2 is an Fc region; n is 0 or 1, and wherein the VD1 domains on the first and second polypeptide chains form a first functional target binding site and the VD2 domains on the first and second polypeptide chains form a second functional target binding site. In some embodiments, the binding protein is capable of binding TNFα and IL-13, TNFα and PGE2, or TNFα and NGF. In an embodiment, binding proteins capable of binding TNFα and IL-13, TNFα and PGE2, or TNFα and NGF with high affinity are provided.

[0011] In one embodiment, binding proteins comprising a polypeptide chain that binds TNFα and IL-13, TNFα and PGE2, or TNFα and NGF, wherein the polypeptide chain comprises VD1-(X1)n-VD2-C-(X2)n, wherein VD1 is a first variable domain, VD2 is a second variable domain, C is a constant domain, X1 represents an amino acid or polypeptide, X2 represents an Fc region and n is 0 or 1, are provided. In an embodiment, the VD1 and/or VD2 in the binding protein are heavy chain variable domains. In an embodiment, the VD1 and/or VD2 in the binding protein are light chain variable domains. In another embodiment, VD1 and VD2 are capable of binding the same antigen. In another embodiment, VD1 and VD2 are capable of binding different antigens. In still another embodiment, C is a heavy chain constant domain. For example, X1 is a linker with the proviso that X1 is not CH1.

[0012] In an embodiment, the binding protein disclosed herein comprises a polypeptide chain that binds TNFα and IL-13, TNFα and PGE2, or TNFα and NGF, wherein the polypeptide chain comprises VD1-(X1)n-VD2-C-(X2)n, wherein VD1 is a first heavy chain variable domain, VD2 is a second heavy chain variable domain, C is a heavy chain constant domain, X1 is a linker, and X2 is an Fc region. In an embodiment, X1 is a linker with the proviso that it is not CH1.

[0013] In an embodiment, the binding protein disclosed herein comprises a polypeptide chain that binds TNFα and IL-13, TNFα and PGE2, or TNFα and NGF, wherein the polypeptide chain comprises VD1-(X1)n-VD2-C-(X2)n, wherein VD1 is a first light chain variable domain, VD2 is a second light chain variable domain, C is a light chain constant domain, X1 is a linker, and X2 does not comprise an Fc region. In an embodiment, X1 is a linker with the proviso that it is not CL.

[0014] In another embodiment, a binding protein that binds TNFα and IL-13, TNFα and PGE2, or TNFα and NGF comprising two polypeptide chains, wherein the first polypeptide chain comprises VD1-(X1)n-VD2-C-(X2)n, wherein VD1 is a first heavy chain variable domain, VD2 is a second heavy chain variable domain, C is a heavy chain constant domain, X1 is a first linker, and X2 is an Fc region; and the second polypeptide chain comprises VD1-(X1)n-VD2-C-(X2)n, wherein VD1 is a first light chain variable domain, VD2 is a second light chain variable domain, C is a light chain constant domain, X1 is a second linker, and X2 does not comprise an Fc region is provided. In some embodiments, the first and second X1 are the same. In other embodiments, the first and second X1 are different. In some embodiments the first X1 is not a CH1 domain and/or the second X1 is not a CL domain. In one embodiment, the first X1 and the second X1 are short (e.g., 6 amino acid) linkers. In another embodiment, the first X1 and the second X1 are long (e.g., greater than 6 amino acid) linkers. In another embodiment, the first X1 is a short linker and the second X1 is a long linker. In another embodiment, the first X1 is a long linker and the second X1 is a short linker.

[0015] In an embodiment, the invention provides a Dual Variable Domain (DVD) binding protein comprising four polypeptide chains, wherein each of the first two polypeptide chains comprises VD1-(X1)n-VD2-C-(X2)n, wherein VD1 is a first heavy chain variable domain, VD2 is a second heavy chain variable domain, C is a heavy chain constant domain, X1 is a first linker, and X2 is an Fc region; and each of the second two polypeptide chain comprises VD1-(X1)n-VD2-C-(X2)n, wherein VD1 is a first light chain variable domain, VD2 is a second light chain variable domain, C is a light chain constant domain, X1 is a second linker, and X2 does not comprise an Fc region. Such a DVD binding protein has four antigen binding sites. In some embodiments, the first and second X1 are the same. In other embodiments, the first and second X1 are different. In some embodiments, the first X1 is not a CH1 domain and/or the second X1 is not a CL domain. In another embodiment, the binding proteins disclosed herein are capable of binding TNFα and IL-13, TNFα and PGE2, or TNFα and NGF. Accordingly, in some embodiments, the binding proteins comprise at least two variable domain sequences (e.g., VD1 and VD2) capable of binding TNFα and IL-13, TNFα and PGE2, or TNFα and NGF, in any orientation. In some embodiments, VD1 and VD2 are independently chosen. Therefore, in some embodiments, VD1 and VD2 comprise the same SEQ ID NO and, in other embodiments, VD1 and VD2 comprise different SEQ ID NOS.

[0016] In an embodiment, the invention provides a binding protein comprising first and second polypeptide chains, each independently comprising VD1-(X1)n-VD2-C—(X2)n, wherein VD1 is a first variable domain; VD2 is a second variable domain; C is a constant domain; X1 is a linker with the proviso that it is not CH1; X2 is an Fc region; n is 0 or 1, wherein the VD1 domains on the first and second polypeptide chains form a first functional target binding site and the VD2 domains on the first and second polypeptide chains form a second functional target binding site, and wherein (a) the binding protein is capable of binding TNFα and IL-13, wherein (i) the variable domains that form a functional target binding site for TNF comprise a sequence selected from the group consisting of SEQ ID NOs: 38-49 and/or the binding protein is capable of binding TNFα with a K_{D} of at most about 5.8×10⁻¹¹ M, as measured by surface plasmon resonance, and/or (ii) the variable domains that form a functional target binding site for IL-13 comprise a sequence selected from the group consisting of SEQ ID NO: 32-37, and/or the binding protein is capable of binding IL-13 with a K_{D} of at most about 1.2×10⁻⁹ M, as measured by surface plasmon resonance; (b) the binding protein is capable of binding TNFα and PGE2, wherein (i) the variable domains that form a functional target binding site for TNFα comprise a sequence selected from the group consisting of SEQ ID NOs: 38-49 and/or the binding protein is capable of inhibiting TNFα with an IC50 of at most about 3.076 nM, as measured by a TNFα neutralization assay, as measured by surface plasmon resonance, and/or (ii) the variable domains that form a functional target binding site for PGE2 comprise a sequence selected from the group consisting of SEQ ID NO: 50-55, and/or the binding protein is capable of inhibiting PGE2 with an IC50 of at most about 124.8 nM, as measured by a PGE2 neutralization assay; or (c) the binding protein is capable of binding TNFα and NGF, wherein (i) the variable domains that form a functional target binding site for TNFα comprise a sequence selected from the group consisting of SEQ ID NOs: 38-49 and/or the binding protein is capable of inhibiting TNFα with an IC50 of at most about 0.673 nM, as measured by a TNFα neutralization assay, and/or (ii) the variable domains that form a functional target binding site for NGF comprise a sequence selected from the group consisting of SEQ ID NO: 56-57, and/or the binding protein is capable of inhibiting NGF with an IC50 of at most about 7.455 nM, as measured by a TF-1 cell proliferation bioassay.

[0017] In another embodiment, the invention provides a binding protein comprising first and second polypeptide chains, each independently comprising VD1-(X1)n-VD2-C-(X2)n, wherein VD1 is a first variable domain; VD2 is a second variable domain; C is a constant domain; X1 is a linker with the proviso that it is not CH1; X2 is an Fc region; n is 0 or 1, wherein the VD1 domains on the first and second polypeptide chains form a first functional target binding site and the VD2 domains on the first and second polypeptide chains form a second functional target binding site, and wherein (a) the binding protein is capable of binding TNFα and IL-13, wherein (i) the variable domains that form a functional target binding site for TNFα comprise: three CDRs from SEQ ID NO: 38 and three CDRs from SEQ ID NO: 39, three CDRs from SEQ ID NO: 40 and three CDRs from SEQ ID NO: 41, three CDRs from SEQ ID NO: 42 and three CDRs from SEQ ID NO: 43, three CDRs from SEQ ID NO: 44 and three CDRs from SEQ ID NO: 45, or three CDRs from SEQ ID NO: 46 and three CDRs from SEQ ID NO: 47; three CDRs from SEQ ID NO: 48 and three CDRs from SEQ ID NO: 49; and/or the binding protein is capable of binding TNFα with a K_{D} of at most about 5.8×10⁻¹¹ M, as measured by surface plasmon resonance, and/or (ii) the variable domains that form a functional target binding site for IL-13 comprise three CDRs from SEQ ID NO: 32 and three CDRs from SEQ ID NO: 33; three CDRs from SEQ ID NO: 34 and three CDRs from SEQ ID NO: 35; or three CDRs from SEQ ID NO: 36 and three CDRs from SEQ ID NO: 37; and/or the binding protein is capable of binding IL-13 with a K_{D} of at most about 1.2×10⁻⁹ M, as measured by surface plasmon resonance; (b) the binding protein is capable of binding TNFα and PGE2, wherein (i) the variable domains that form a functional target binding site for TNFα comprise: three CDRs from SEQ ID NO: 38 and three CDRs from SEQ ID NO: 39, three CDRs from SEQ ID NO: 40 and three CDRs from SEQ ID NO: 41, three CDRs from SEQ ID NO: 42 and three CDRs from SEQ ID NO: 43, three CDRs from SEQ ID NO: 44 and three CDRs from SEQ ID NO: 45, or three CDRs from SEQ ID NO: 46 and three CDRs from SEQ ID NO: 47; three CDRs from SEQ ID NO: 48 and three CDRs from SEQ ID NO: 49; and/or the binding protein is capable of inhibiting TNFα with an IC50 of at most about 3.076 nM, as measured by a TNFα neutralization assay, and/or (ii) the variable domains that form a functional target binding site for PGE2 comprise three CDRs from SEQ ID NO: 50 and three CDRs from SEQ ID NO: 51; three CDRs from SEQ ID NO: 52 and three CDRs from SEQ ID NO: 53; or three CDRs from SEQ ID NO: 54 and three CDRs from SEQ ID NO: 55; and/or the binding protein is capable of inhibiting PGE2 with an IC50 of at most about 124.8 nM, as measured by a PGE2 neutralization assay; or (c) the binding protein is capable of binding TNFα and NGF, wherein (i) the variable domains that form a functional target binding site for TNFα comprise: three CDRs from SEQ ID NO: 38 and three CDRs from SEQ ID NO: 39, three CDRs from SEQ ID NO: 40 and three CDRs from SEQ ID NO: 41, three CDRs from SEQ ID NO: 42 and three CDRs from SEQ ID NO: 43, three CDRs from SEQ ID NO: 44 and three CDRs from SEQ ID NO: 45, or three CDRs from SEQ ID NO: 46 and three CDRs from SEQ ID NO: 47; three CDRs from SEQ ID NO: 48 and three CDRs from SEQ ID NO: 49; and/or the binding protein is capable of inhibiting TNFα with an IC50 of at most about 0.673 nM, as measured by a TNFα neutralization assay, and/or (ii) the variable domains that form a functional target binding site for NGF comprise three CDRs from SEQ ID NO: 56 and three CDRs from SEQ ID NO: 57; and/or the binding protein is capable of inhibiting NGF with an IC50 of at most about 7.455 nM, as measured by a TF-1 cell proliferation bioassay.

[0018] In an embodiment, the first polypeptide chain comprises a first VD1-(X1)n-VD2-C-(X2)n, wherein VD1 is a first heavy chain variable domain; VD2 is a second heavy chain variable domain; C is a heavy chain constant domain; X1 is a linker with the proviso that it is not CH1; X2 is an Fc region; n is 0 or 1, and wherein the second polypeptide chain comprises a second VD1-(X1)n-VD2-C-(X2)n, wherein VD1 is a first light chain variable domain; VD2 is a second light chain variable domain; C is a light chain constant domain; X1 is a linker with the proviso that it is not CH1; X2 does not comprise an Fc region; n is 0 or 1, wherein the VD1 domains on the first and second polypeptide chains form a first functional target binding site and the VD2 domains on the first and second polypeptide chains form a second functional target binding site.

[0019] In another embodiment, (a) the binding protein is capable of binding TNFα and IL-13, wherein (i) the variable domains that form a functional target binding site for TNFα comprise: (1) SEQ ID NO: 38 and SEQ ID NO: 39, (2) SEQ ID NO: 40 and SEQ ID NO: 41, (3) SEQ ID NO: 42 and SEQ ID NO: 43, (4) SEQ ID NO: 44 and SEQ ID NO: 45, (5) SEQ ID NO: 46 and SEQ ID NO: 47; (6) SEQ ID NO: 48 and SEQ ID NO: 49; and/or (ii) the variable domains that form a functional target binding site for IL-13 comprise: (1) SEQ ID NO: 32 and SEQ ID NO: 33, (2) SEQ ID NO: 34 and SEQ ID NO: 35, or (3) SEQ ID NO: 36 and SEQ ID NO: 37.

[0020] In another embodiment, the binding protein comprises two first polypeptide chains and two second polypeptide chains, wherein the binding protein comprises four functional target binding sites. In another embodiment, X1 is any one of SEQ ID NO: 1-31. In another embodiment, X1 is not CL In another embodiment, the Fc region is an Fc region from an IgG1, IgG2, IgG3, IgG4, IgA, IgM, IgE, or IgD.

[0021] In another embodiment, the invention provides a binding protein capable of binding TNFα and IL-13, comprising any DVD-Ig VH and VL from Table 2.

[0022] In another embodiment, the invention provides a binding protein capable of binding TNFα and PGE2, comprising any DVD-Ig VH and VL from Table 3.

[0023] In another embodiment, the invention provides a binding protein capable of binding TNFα and NGF, comprising any DVD-Ig VH and VL from Table 4.

[0024] In another embodiment, the binding protein comprises a heavy chain and a light chain sequence as shown in the Table 1 herein.

[0025] In an embodiment, any of the heavy chain, light chain, two chain, or four chain embodiments, includes at least one X1 linker comprising AKTTPKLEEGEFSEAR (SEQ ID NO: 1); AKTTPKLEEGEFSEARV (SEQ ID NO: 2); AKTTPKLGG (SEQ ID NO: 3); SAKTTPKLGG (SEQ ID NO: 4); SAKTTP (SEQ ID NO: 5); RADAAP (SEQ ID NO: 6); RADAAPTVS (SEQ ID NO: 7); RADAAAAGGPGS (SEQ ID NO: 8); RADAAAA(G₄S)₄ (SEQ ID NO: 9); SAKTTPKLEEGEFSEARV (SEQ ID NO: 10); ADAAP (SEQ ID NO: 11); ADAAPTVSIFPP (SEQ ID NO: 12); TVAAP (SEQ ID NO: 13); TVAAPSVFIFPP (SEQ ID NO: 14); QPKAAP (SEQ ID NO: 15); QPKAAPSVTLFPP (SEQ ID NO: 16); AKTTPP (SEQ ID NO: 17); AKTTPPSVTPLAP (SEQ ID NO: 18); AKTTAP (SEQ ID NO: 19); AKTTAPSVYPLAP (SEQ ID NO: 20); ASTKGP (SEQ ID NO: 21); ASTKGPSVFPLAP (SEQ ID NO: 22), GGGGSGGGGSGGGGS (SEQ ID NO: 23); GENKVEYAPALMALS (SEQ ID NO: 24); GPAKELTPLKEAKVS (SEQ ID NO: 25); or GHEAAAVMQVQYPAS (SEQ ID NO: 26); TVAAPSVFIFPPTVAAPSVFIFPP (SEQ ID NO: 27); ASTKGPSVFPLAPASTKGPSVFPLAP (SEQ ID NO: 28); GGGGSGGGGS (SEQ ID NO: 29); GGSGGGGSG (SEQ ID NO: 30); or G/S based sequences (e.g., G4S and G4S repeats; SEQ ID NO: 31). In an embodiment, X1 is not a constant region, is not a CH region, or is not a CL region. In an embodiment, X2 is an Fc region. In another embodiment, X2 is a variant Fc region.

[0026] In still another embodiment, the Fc region, if present in the first polypeptide, is a native sequence Fc region or a variant sequence Fc region. In yet another embodiment, the Fc region is an Fc region from an IgG1, an Fc region from an IgG2, an Fc region from an IgG3, an Fc region from an IgG4, an Fc region from an IgA, an Fc region from an IgM, an Fc region from an IgE, or an Fc region from an IgD.

[0027] In another aspect, the invention provides a method of making a binding protein that binds TNFα and/or IL-13 is provided. In an embodiment, the method of making a binding protein that binds TNFα and/or IL-13 comprises the steps of a) obtaining a first parent antibody, or antigen binding portion thereof, that binds TNFα; b) obtaining a second parent antibody, or antigen binding portion thereof, that binds IL-13; c) preparing construct(s) encoding any of the binding proteins described herein; and d) expressing the polypeptide chains, such that a binding protein that binds the first and the second antigen is generated.

[0028] A method of making a binding protein that binds TNFα and/or PGE2 is provided. In an embodiment, the method of making a binding protein that binds TNFα and/or PGE2 comprises the steps of a) obtaining a first parent antibody, or antigen binding portion thereof, that binds TNFα; b) obtaining a second parent antibody, or antigen binding portion thereof, that binds PGE2; c) preparing construct(s) encoding any of the binding proteins described herein; and d) expressing the polypeptide chains, such that a binding protein that binds the first and the second antigen is generated.

[0029] A method of making a binding protein that binds TNFα and/or NGF is provided. In an embodiment, the method of making a binding protein that binds TNFα and/or NGF comprises the steps of a) obtaining a first parent antibody, or antigen binding portion thereof, that binds TNFα; b) obtaining a second parent antibody, or antigen binding portion thereof, that binds NGF; c) preparing construct(s) encoding any of the binding proteins described herein; and d) expressing the polypeptide chains, such that a binding protein that binds the first and the second antigen is generated.

[0030] In any of the embodiments herein, the VD1 heavy chain variable domain, if present, and light chain variable domain, if present, can be from a first parent antibody or antigen binding portion thereof; the VD2 heavy chain variable domain, if present, and light chain variable domain, if present, can be from a second parent antibody or antigen binding portion thereof. The first and second parent antibodies can be the same or different.

[0031] In one embodiment, the first parent antibody or antigen binding portion thereof, binds a first antigen, and the second parent antibody or antigen binding portion thereof, binds a second antigen. In an embodiment, the first and second antigens are the same antigen. In another embodiment, the parent antibodies bind different epitopes on the same antigen. In another embodiment, the first and second antigens are different antigens. In another embodiment, the first parent antibody or antigen binding portion thereof, binds the first antigen with a potency different from the potency with which the second parent antibody or antigen binding portion thereof, binds the second antigen. In yet another embodiment, the first parent antibody or antigen binding portion thereof, binds the first antigen with an affinity different from the affinity with which the second parent antibody or antigen binding portion thereof, binds the second antigen.

[0032] In another embodiment, the first parent antibody or antigen binding portion thereof, and the second parent antibody or antigen binding portion thereof, are a human antibody, CDR grafted antibody, humanized antibody, and/or affinity matured antibody.

[0033] In another embodiment, the binding protein possesses at least one desired property exhibited by the first parent antibody or antigen binding portion thereof, or the second parent antibody or antigen binding portion thereof. Alternatively, the first parent antibody or antigen binding portion thereof and the second parent antibody or antigen binding portion thereof possess at least one desired property exhibited by the binding protein. In an embodiment, the desired property is one or more antibody parameters. In another embodiment, the antibody parameters are antigen specificity, affinity to antigen, potency, biological function, epitope recognition, stability, solubility, production efficiency, immunogenicity, pharmacokinetics, bioavailability, tissue cross reactivity, or orthologous antigen binding. In an embodiment, the binding protein is multivalent. In another embodiment, the binding protein is multispecific. The multivalent and or multispecific binding proteins described herein have desirable properties particularly from a therapeutic standpoint. For instance, the multivalent and or multispecific binding protein may (1) be internalized (and/or catabolized) faster than a bivalent antibody by a cell expressing an antigen to which the antibodies bind; (2) be an agonist binding protein; and/or (3) induce cell death and/or apoptosis of a cell expressing an antigen to which the multivalent binding protein is capable of binding. The “parent antibody”, which provides at least one antigen binding specificity of the multivalent and or multispecific binding protein, may be one that is internalized (and/or catabolized) by a cell expressing an antigen to which the antibody binds; and/or may be an agonist, cell death-inducing, and/or apoptosis-inducing antibody, and the multivalent and or multispecific binding protein as described herein may display improvement(s) in one or more of these properties. Moreover, the parent antibody may lack any one or more of these properties, but may acquire one or more of them when constructed as a multivalent binding protein as described herein.

[0034] In another embodiment, the binding protein has an on rate constant (Kₒₙ) to one or more targets of at least about 10² M⁻¹ s¹; at least about 10³ M⁻¹ s⁻¹; at least about 10⁴ M⁻¹ s⁻¹; at least about 10⁵ M⁻¹ s⁻¹; or at least about 10⁶ M⁻¹ s⁻¹, as measured by surface plasmon resonance. In an embodiment, the binding protein has an on rate constant (Kₒₙ) to one or more targets from about 10² M⁻¹ s⁻¹ to about 10³ M⁻¹ s⁻¹; from about 10³ M⁻¹ s⁻¹ to about 10⁴ M⁻¹ s⁻¹; from about 10⁴ M⁻¹ s⁻¹ to about 10⁵ M⁻¹ s⁻¹; or from about 10⁵ M⁻¹ s⁻¹ to about 10⁶ M⁻¹ s⁻¹, as measured by surface plasmon resonance.

[0035] In another embodiment, the binding protein has an off rate constant (K_{off}) for one or more targets of at most about 10⁻³ s⁻¹; at most about 10⁻⁴ s⁻¹; at most about 10⁻⁵ s⁻¹; or at most about 10⁻⁶ s⁻¹, as measured by surface plasmon resonance. In an embodiment, the binding protein has an off rate constant (K_{off}) to one or more targets of about 10⁻³ s⁻¹ to about 10⁻⁴ s⁻¹; of about 10⁻⁴ s⁻¹ to about 10⁻⁵ s⁻¹; or of about 10⁻⁵ s⁻¹ to about 10⁻⁶ s⁻¹, as measured by surface plasmon resonance.

[0036] In another embodiment, the binding protein has a dissociation constant (K_{d}) to one or more targets of at most about 10⁻⁷ M; at most about 10⁻⁸ M; at most about 10⁻⁹ M; at most about 10⁻¹⁰ M; at most about 10⁻¹¹ M; at most about 10⁻¹² M; or at most 10⁻¹³ M. In an embodiment, the binding protein has a dissociation constant (K_{d}) to its targets of about 10⁻⁷ M to about 10⁻⁸ M; of about 10⁻⁸ M to about 10⁻⁹ M; of about 10⁻⁹ M to about 10⁻¹⁰ M; of about 10⁻¹⁰ M to about 10⁻¹¹ M; of about 10⁻¹¹ M to about 10⁻¹² M; or of about 10⁻¹² to M about 10⁻¹³ M.

[0037] In another embodiment, the binding protein is a conjugate further comprising an agent. In an embodiment, the agent is an immunoadhesion molecule, an imaging agent, a therapeutic agent, or a cytotoxic agent. In an embodiment, the imaging agent is a radiolabel, an enzyme, a fluorescent label, a luminescent label, a bioluminescent label, a magnetic label, or biotin. In another embodiment, the radiolabel is ³H, ¹⁴C, ³⁵S, ⁹⁰Y, ⁹⁹Tc, ¹¹¹In, ¹²⁵I, ¹³¹I, ¹⁷⁷Lu, ¹⁶⁶Ho, or ¹⁵³Sm. In yet another embodiment, the therapeutic or cytotoxic agent is an anti-metabolite, an alkylating agent, an antibiotic, a growth factor, a cytokine, an anti-angiogenic agent, an anti-mitotic agent, an anthracycline, toxin, or an apoptotic agent.

[0038] In another embodiment, the binding protein is a crystallized binding protein and exists as a crystal. In an embodiment, the crystal is a carrier-free pharmaceutical controlled release crystal. In another embodiment, the crystallized binding protein has a greater half life in vivo than the soluble counterpart of the binding protein. In yet another embodiment, the crystallized binding protein retains biological activity.

[0039] In another embodiment, the binding protein described herein is glycosylated. For example, the glycosylation pattern is a human glycosylation pattern.

[0040] An isolated nucleic acid encoding any one of the binding proteins disclosed herein is also provided. A further embodiment provides a vector comprising the isolated nucleic acid disclosed herein wherein the vector is pcDNA; pTT (Durocher et al. (2002) Nucleic Acids Res. 30(2); pTT3 (pTT with additional multiple cloning site; pEFBOS (Mizushima and Nagata (1990) Nucleic Acids Res. 18(17); pBV; pJV; pcDNA3.1 TOPO; pEF6 TOPO; pBOS; pHybE; or pBJ. In an embodiment, the vector is a vector disclosed in US Patent Publication No. 20090239259.

[0041] In another aspect, a host cell is transformed with the vector disclosed herein. In an embodiment, the host cell is a prokaryotic cell, for example, E. coli. In another embodiment, the host cell is a eukaryotic cell, for example, a protist cell, an animal cell, a plant cell, or a fungal cell. In an embodiment, the host cell is a mammalian cell including, but not limited to, CHO, COS, NSO, SP2, PER.C6, or a fungal cell, such as Saccharomyces cerevisiae, or an insect cell, such as Sf9. In an embodiment, two or more binding proteins, e.g., with different specificities, are produced in a single recombinant host cell. For example, the expression of a mixture of antibodies has been called Oligoclonics™ (Merus B.V., The Netherlands) U.S. Pat. Nos. 7,262,028 and 7,429,486.

[0042] A method of producing a binding protein disclosed herein comprising culturing any one of the host cells disclosed herein in a culture medium under conditions sufficient to produce the binding protein is provided. In an embodiment, 50%-75% of the binding protein produced by this method is a dual specific tetravalent binding protein. In another embodiment, 75%-90% of the binding protein produced by this method is a dual specific tetravalent binding protein. In another embodiment, 90%-95% of the binding protein produced is a dual specific tetravalent binding protein.

[0043] One embodiment provides a composition for the release of a binding protein wherein the composition comprises a crystallized binding protein, an ingredient, and at least one polymeric carrier. In an embodiment, the polymeric carrier is poly (acrylic acid), a poly(cyanoacrylate), a poly(amino acid), a poly(anhydride), a poly (depsipeptide), a poly(ester), poly(lactic acid), poly(lactic-co-glycolic acid) or PLGA, poly(b-hydroxybutryate), poly(caprolactone), poly(dioxanone), poly(ethylene glycol), poly((hydroxypropyl)methacrylamide, poly [(organo)phosphazene], a poly(ortho ester), poly(vinyl alcohol), poly(vinylpyrrolidone), a maleic anhydride-alkyl vinyl ether copolymer, a pluronic polyol, albumin, alginate, cellulose, a cellulose derivative, collagen, fibrin, gelatin, hyaluronic acid, an oligosaccharide, a glycaminoglycan, a sulfated polysaccharide, or blends and copolymers thereof. In an embodiment, the ingredient is albumin, sucrose, trehalose, lactitol, gelatin, hydroxypropyl-β-cyclodextrin, methoxypolyethylene glycol, or polyethylene glycol.

[0044] Another embodiment provides a method for treating a mammal comprising the step of administering to the mammal an effective amount of a composition disclosed herein.

[0045] A pharmaceutical composition comprising a binding protein disclosed herein and a pharmaceutically acceptable carrier is provided. In a further embodiment, the pharmaceutical composition comprises at least one additional therapeutic agent for treating a disorder. For example, the additional agent may be a therapeutic agent, an imaging agent, a cytotoxic agent, an angiogenesis inhibitor (including but not limited to an anti-VEGF antibody or a VEGF-trap), a kinase inhibitor (including but not limited to a KDR and a TIE-2 inhibitor), a co-stimulation molecule blocker (including but not limited to anti-B7.1, anti-B7.2, CTLA4-Ig, anti-CD20), an adhesion molecule blocker (including but not limited to an anti-LFA-1 antibody, an anti-E/L selectin antibody, a small molecule inhibitor), an anti-cytokine antibody or functional fragment thereof (including but not limited to an anti-IL-18, an anti-TNF, and an anti-IL-6/cytokine receptor antibody), methotrexate, cyclosporin, rapamycin, FK506, a detectable label or reporter, a TNF antagonist, an antirheumatic, a muscle relaxant, a narcotic, a non-steroid anti-inflammatory drug (NSAID), an analgesic, an anesthetic, a sedative, a local anesthetic, a neuromuscular blocker, an antimicrobial, an antipsoriatic, a corticosteriod, an anabolic steroid, an erythropoietin, an immunization, an immunoglobulin, an immunosuppressive, a growth hormone, a hormone replacement drug, a radiopharmaceutical, an antidepressant, an antipsychotic, a stimulant, an asthma medication, a beta agonist, an inhaled steroid, an epinephrine or analog, a cytokine, or a cytokine antagonist.

[0046] A method for treating a human subject suffering from a disorder in which the target, or targets, capable of being bound by the binding protein disclosed herein is detrimental, comprising administering to the human subject a binding protein disclosed herein such that the activity of the target, or targets, in the human subject is inhibited and one or more symptoms is alleviated or treatment is achieved is provided. The binding proteins provided herein can be used to treat humans suffering from autoimmune diseases such as, for example, those associated with inflammation. In an embodiment, the binding proteins provided herein or antigen-binding portions thereof, are used to treat asthma, allergies, allergic lung disease, allergic rhinitis, atopic dermatitis, chronic obstructive pulmonary disease (COPD), fibrosis, cystic fibrosis (CF), fibrotic lung disease, idiopathic pulmonary fibrosis, liver fibrosis, lupus, hepatitis B-related liver diseases and fibrosis, sepsis, systemic lupus erythematosus (SLE), glomerulonephritis, inflammatory skin diseases, psoriasis, diabetes, insulin dependent diabetes mellitus, infectious diseases caused by HIV, inflammatory bowel disease (IBD), ulcerative colitis (UC), Crohn's disease (CD), rheumatoid arthritis (RA), osteoarthritis (OA), multiple sclerosis (MS), graft-versus-host disease (GVHD), transplant rejection, ischemic heart disease (IHD), celiac disease, contact hypersensitivity, alcoholic liver disease, Behcet's disease, atherosclerotic vascular disease, occular surface inflammatory diseases, or Lyme disease.

[0047] In another embodiment, the disorder or condition to be treated comprises the symptoms caused by viral infection in a human which is caused by, for example, HIV, the human rhinovirus, an enterovirus, a coronavirus, a herpes virus, an influenza virus, a parainfluenza virus, a respiratory syncytial virus or an adenovirus.

[0048] The binding proteins provided herein can be used to treat neurological disorders. In an embodiment, the binding proteins provided herein, or antigen-binding portions thereof, are used to treat neurodegenerative diseases and conditions involving neuronal regeneration and spinal cord injury.

[0049] In an embodiment, diseases that can be treated or diagnosed with the compositions and methods disclosed herein include, but are not limited to, primary and metastatic cancers, including carcinomas of breast, colon, rectum, lung, oropharynx, hypopharynx, esophagus, stomach, pancreas, liver, gallbladder and bile ducts, small intestine, urinary tract (including kidney, bladder and urothelium), female genital tract (including cervix, uterus, and ovaries as well as choriocarcinoma and gestational trophoblastic disease), male genital tract (including prostate, seminal vesicles, testes and germ cell tumors), endocrine glands (including the thyroid, adrenal, and pituitary glands), and skin, as well as hemangiomas, melanomas, sarcomas (including those arising from bone and soft tissues as well as Kaposi's sarcoma), tumors of the brain, nerves, eyes, and meninges (including astrocytomas, gliomas, glioblastomas, retinoblastomas, neuromas, neuroblastomas, Schwannomas, and meningiomas), solid tumors arising from hematopoietic malignancies such as leukemias, and lymphomas (both Hodgkin's and non-Hodgkin's lymphomas).

[0050] Another embodiment provides for the use of the binding protein in the treatment of a disease or disorder, wherein said disease or disorder is rheumatoid arthritis, osteoarthritis, juvenile chronic arthritis, septic arthritis, Lyme arthritis, psoriatic arthritis, reactive arthritis, spondyloarthropathy, systemic lupus erythematosus, Crohn's disease, ulcerative colitis, inflammatory bowel disease, insulin dependent diabetes mellitus, thyroiditis, asthma, allergic diseases, psoriasis, dermatitis scleroderma, graft versus host disease, organ transplant rejection, acute or chronic immune disease associated with organ transplantation, sarcoidosis, atherosclerosis, disseminated intravascular coagulation, Kawasaki's disease, Grave's disease, nephrotic syndrome, chronic fatigue syndrome, Wegener's granulomatosis, Henoch-Schoenlein purpurea, microscopic vasculitis of the kidneys, chronic active hepatitis, uveitis, septic shock, toxic shock syndrome, sepsis syndrome, cachexia, infectious diseases, parasitic diseases, acquired immunodeficiency syndrome, acute transverse myelitis, Huntington's chorea, Parkinson's disease, Alzheimer's disease, stroke, primary biliary cirrhosis, hemolytic anemia, malignancies, heart failure, Addison's disease, sporadic, polyglandular deficiency type I and polyglandular deficiency type II, Schmidt's syndrome, adult (acute) respiratory distress syndrome, alopecia, alopecia greata, arthropathy, Reiter's disease, psoriatic arthropathy, ulcerative colitic arthropathy, enteropathic synovitis, chlamydia, yersinia and salmonella associated arthropathy, atheromatous disease/arteriosclerosis, atopic allergy, autoimmune bullous disease, pemphigus vulgaris, pemphigus foliaceus, pemphigoid, linear IgA disease, autoimmune haemolytic anaemia, Coombs positive haemolytic anaemia, acquired pernicious anaemia, juvenile pernicious anaemia, myalgic encephalitis/Royal Free Disease, chronic mucocutaneous candidiasis, giant cell arteritis, primary sclerosing hepatitis, cryptogenic autoimmune hepatitis, acquired immunodeficiency related diseases, hepatitis B, hepatitis C, common varied immunodeficiency (common variable hypogammaglobulinaemia), dilated cardiomyopathy, female infertility, ovarian failure, premature ovarian failure, fibrotic lung disease, cryptogenic fibrosing alveolitis, post-inflammatory interstitial lung disease, interstitial pneumonitis, connective tissue disease associated interstitial lung disease, mixed connective tissue disease associated lung disease, systemic sclerosis associated interstitial lung disease, rheumatoid arthritis associated interstitial lung disease, systemic lupus erythematosus associated lung disease, dermatomyositis/polymyositis associated lung disease, Sjögren's disease associated lung disease, ankylosing spondylitis associated lung disease, vasculitic diffuse lung disease, haemosiderosis associated lung disease, drug-induced interstitial lung disease, fibrosis, radiation fibrosis, bronchiolitis obliterans, chronic eosinophilic pneumonia, lymphocytic infiltrative lung disease, postinfectious interstitial lung disease, gouty arthritis, autoimmune hepatitis, type-1 autoimmune hepatitis (classical autoimmune or lupoid hepatitis), type-2 autoimmune hepatitis (anti-LKM antibody hepatitis), autoimmune mediated hypoglycaemia, type B insulin resistance with acanthosis nigricans, hypoparathyroidism, acute immune disease associated with organ transplantation, chronic immune disease associated with organ transplantation, osteoarthrosis, primary sclerosing cholangitis, psoriasis type 1, psoriasis type 2, idiopathic leucopaenia, autoimmune neutropaenia, renal disease NOS, glomerulonephritides, microscopic vasulitis of the kidneys, lyme disease, discoid lupus erythematosus, male infertility idiopathic or NOS, sperm autoimmunity, multiple sclerosis (all subtypes), sympathetic ophthalmia, pulmonary hypertension secondary to connective tissue disease, Goodpasture's syndrome, pulmonary manifestation of polyarteritis nodosa, acute rheumatic fever, rheumatoid spondylitis, Still's disease, systemic sclerosis, Sjorgren's syndrome, Takayasu's disease/arteritis, autoimmune thrombocytopaenia, idiopathic thrombocytopaenia, autoimmune thyroid disease, hyperthyroidism, goitrous autoimmune hypothyroidism (Hashimoto's disease), atrophic autoimmune hypothyroidism, primary myxoedema, phacogenic uveitis, primary vasculitis, vitiligo acute liver disease, chronic liver diseases, alcoholic cirrhosis, alcohol-induced liver injury, choleosatatis, idiosyncratic liver disease, drug-induced hepatitis, non-alcoholic steatohepatitis, allergy and asthma, group B streptococci (GBS) infection, mental disorders, depression, schizophrenia, Th2 Type and Th1 Type mediated diseases, acute and chronic pain, different forms of pain, cancers, lung cancer, breast cancer, stomach cancer, bladder cancer, colon cancer, pancreatic cancer, ovarian cancer, prostate cancer, rectal cancer, hematopoietic malignancies, leukemia, lymphoma, Abetalipoprotemia, acrocyanosis, acute and chronic parasitic or infectious processes, acute leukemia, acute lymphoblastic leukemia (ALL), acute myeloid leukemia (AML), acute or chronic bacterial infection, acute pancreatitis, acute renal failure, adenocarcinomas, aerial ectopic beats, AIDS dementia complex, alcohol-induced hepatitis, allergic conjunctivitis, allergic contact dermatitis, allergic rhinitis, allograft rejection, alpha-1-antitrypsin deficiency, amyotrophic lateral sclerosis, anemia, angina pectoris, anterior horn cell degeneration, anti cd3 therapy, antiphospholipid syndrome, anti-receptor hypersensitivity reactions, aortic and peripheral aneuryisms, aortic dissection, arterial hypertension, arteriosclerosis, arteriovenous fistula, ataxia, atrial fibrillation (sustained or paroxysmal), atrial flutter, atrioventricular block, B cell lymphoma, bone graft rejection, bone marrow transplant (BMT) rejection, bundle branch block, Burkitt's lymphoma, burns, cardiac arrhythmias, cardiac stun syndrome, cardiac tumors, cardiomyopathy, cardiopulmonary bypass inflammation response, cartilage transplant rejection, cerebellar cortical degenerations, cerebellar disorders, chaotic or multifocal atrial tachycardia, chemotherapy associated disorders, chronic myelocytic leukemia (CML), chronic alcoholism, chronic inflammatory pathologies, chronic lymphocytic leukemia (CLL), chronic obstructive pulmonary disease (COPD), chronic salicylate intoxication, colorectal carcinoma, congestive heart failure, conjunctivitis, contact dermatitis, cor pulmonale, coronary artery disease, Creutzfeldt-Jakob disease, culture negative sepsis, cystic fibrosis, cytokine therapy associated disorders, dementia pugilistica, demyelinating diseases, dengue hemorrhagic fever, dermatitis, dermatologic conditions, diabetes, diabetes mellitus, diabetic ateriosclerotic disease, diffuse Lewy body disease, dilated congestive cardiomyopathy, disorders of the basal ganglia, Down's syndrome in middle age, drug-induced movement disorders induced by drugs which block CNS dopamine receptors, drug sensitivity, eczema, encephalomyelitis, endocarditis, endocrinopathy, epiglottitis, epstein-barr virus infection, erythromelalgia, extrapyramidal and cerebellar disorders, familial hematophagocytic lymphohistiocytosis, fetal thymus implant rejection, Friedreich's ataxia, functional peripheral arterial disorders, fungal sepsis, gas gangrene, gastric ulcer, glomerular nephritis, graft rejection of any organ or tissue, gram negative sepsis, gram positive sepsis, granulomas due to intracellular organisms, hairy cell leukemia, Hallervorden-Spatz disease, Hashimoto's thyroiditis, hay fever, heart transplant rejection, hemachromatosis, hemodialysis, hemolytic uremic syndrome/thrombolytic thrombocytopenic purpura, hemorrhage, hepatitis A, His bundle arrythmias, HIV infection/HIV neuropathy, Hodgkin's disease, hyperkinetic movement disorders, hypersensitity reactions, hypersensitivity pneumonitis, hypertension, hypokinetic movement disorders, hypothalamic-pituitary-adrenal axis evaluation, idiopathic Addison's disease, idiopathic pulmonary fibrosis, antibody mediated cytotoxicity, Asthenia, infantile spinal muscular atrophy, inflammation of the aorta, influenza a, ionizing radiation exposure, iridocyclitis/uveitis/optic neuritis, ischemia-reperfusion injury, ischemic stroke, juvenile rheumatoid arthritis, juvenile spinal muscular atrophy, Kaposi's sarcoma, kidney transplant rejection, legionella, leishmaniasis, leprosy, lesions of the corticospinal system, lipedema, liver transplant rejection, lymphederma, malaria, malignamt lymphoma, malignant histiocytosis, malignant melanoma, meningitis, meningococcemia, metabolic/idiopathic, migraine headache, mitochondrial multi.system disorder, mixed connective tissue disease, monoclonal gammopathy, multiple myeloma, multiple systems degenerations (Mencel Dejerine-Thomas Shi-Drager and Machado-Joseph), mycobacterium avium intracellulare, mycobacterium tuberculosis, myelodyplastic syndrome, myocardial infarction, myocardial ischemic disorders, nasopharyngeal carcinoma, neonatal chronic lung disease, nephritis, nephrosis, neurodegenerative diseases, neurogenic muscular atrophies, neutropenic fever, non-hodgkins lymphoma, occlusion of the abdominal aorta and its branches, occulsive arterial disorders, okt3 therapy, orchitis/epidydimitis, orchitis/vasectomy reversal procedures, organomegaly, osteoporosis, pancreas transplant rejection, pancreatic carcinoma, paraneoplastic syndrome/hypercalcemia of malignancy, parathyroid transplant rejection, pelvic inflammatory disease, perennial rhinitis, pericardial disease, peripheral atherlosclerotic disease, peripheral vascular disorders, peritonitis, pernicious anemia, pneumocystis carinii pneumonia, pneumonia, POEMS syndrome (polyneuropathy, organomegaly, endocrinopathy, monoclonal gammopathy, and skin changes syndrome), post perfusion syndrome, post pump syndrome, post-MI cardiotomy syndrome, preeclampsia, progressive supranucleo palsy, primary pulmonary hypertension, radiation therapy, Raynaud's phenomenon and disease, Raynoud's disease, Refsum's disease, regular narrow QRS tachycardia, renovascular hypertension, reperfusion injury, restrictive cardiomyopathy, sarcomas, scleroderma, senile chorea, senile dementia of Lewy body type, seronegative arthropathies, shock, sickle cell anemia, skin allograft rejection, skin changes syndrome, small bowel transplant rejection, solid tumors, specific arrythmias, spinal ataxia, spinocerebellar degenerations, streptococcal myositis, structural lesions of the cerebellum, subacute sclerosing panencephalitis, syncope, syphilis of the cardiovascular system, systemic anaphalaxis, systemic inflammatory response syndrome, systemic onset juvenile rheumatoid arthritis, T-cell or FAB ALL telangiectasia, thromboangitis obliterans, thrombocytopenia, toxicity, transplants, trauma/hemorrhage, type III hypersensitivity reactions, type IV hypersensitivity, unstable angina, uremia, urosepsis, valvular heart diseases, varicose veins, vasculitis, venous diseases, venous thrombosis, ventricular fibrillation, viral and fungal infections, vital encephalitis/aseptic meningitis, vital-associated hemaphagocytic syndrome, Wernicke-Korsakoff syndrome, Wilson's disease, xenograft rejection of any organ or tissue, acute coronary syndromes, acute idiopathic polyneuritis, acute inflammatory demyelinating polyradiculoneuropathy, acute ischemia, adult Still's disease, anaphylaxis, anti-phospholipid antibody syndrome, aplastic anemia, atopic eczema, atopic dermatitis, autoimmune dermatitis, autoimmune disorder associated with streptococcus infection, autoimmune enteropathy, autoimmune hearing loss, autoimmune lymphoproliferative syndrome (ALPS), autoimmune myocarditis, autoimmune premature ovarian failure, blepharitis, bronchiectasis, bullous pemphigoid, cardiovascular disease, catastrophic antiphospholipid syndrome, celiac disease, cervical spondylosis, chronic ischemia, cicatricial pemphigoid, clinically isolated syndrome (cis) with risk for multiple sclerosis, childhood onset psychiatric disorder, dacryocystitis, dermatomyositis, diabetic retinopathy, disk herniation, disk prolaps, drug induced immune hemolytic anemia, endometriosis, endophthalmitis, episcleritis, erythema multiforme, erythema multiforme major, gestational pemphigoid, Guillain-Barrê syndrome (GBS), Hughes syndrome, idiopathic Parkinson's disease, idiopathic interstitial pneumonia, IgE-mediated allergy, immune hemolytic anemia, inclusion body myositis, infectious ocular inflammatory disease, inflammatory demyelinating disease, inflammatory heart disease, inflammatory kidney disease, IPF/UIP, iritis, keratitis, keratojuntivitis sicca, Kussmaul disease or Kussmaul-Meier disease, Landry's paralysis, Langerhan's cell histiocytosis, livedo reticularis, macular degeneration, microscopic polyangiitis, morbus bechterev, motor neuron disorders, mucous membrane pemphigoid, multiple organ failure, myasthenia gravis, myelodysplastic syndrome, myocarditis, nerve root disorders, neuropathy, non-A non-B hepatitis, optic neuritis, osteolysis, pauciarticular JRA, peripheral artery occlusive disease (PAOD), peripheral vascular disease (PVD), peripheral artery, disease (PAD), phlebitis, polyarteritis nodosa (or periarteritis nodosa), polychondritis, poliosis, polyarticular JRA, polyendocrine deficiency syndrome, polymyositis, polymyalgia rheumatica (PMR), primary Parkinsonism, prostatitis, pure red cell aplasia, primary adrenal insufficiency, recurrent neuromyelitis optica, restenosis, rheumatic heart disease, sapho (synovitis, acne, pustulosis, hyperostosis, and osteitis), secondary amyloidosis, shock lung, scleritis, sciatica, secondary adrenal insufficiency, silicone associated connective tissue disease, sneddon-wilkinson dermatosis, spondilitis ankylosans, Stevens-Johnson syndrome (SJS), temporal arteritis, toxoplasmic retinitis, toxic epidermal necrolysis, transverse myelitis, TRAPS (tumor necrosis factor receptor, type 1 allergic reaction, type II diabetes, urticaria, usual interstitial pneumonia (UIP), vasculitis, vernal conjunctivitis, viral retinitis, Vogt-Koyanagi-Harada syndrome (VKH syndrome), wet macular degeneration, or wound healing.

[0051] In an embodiment, the binding proteins, or antigen-binding portions thereof, are used to treat cancer or in the prevention or inhibition of metastases from the tumors described herein either when used alone or in combination with radiotherapy and/or chemotherapeutic agents.

[0052] In another aspect, methods of treating a patient suffering from a disorder comprising the step of administering any one of the binding proteins disclosed herein before, concurrently, or after the administration of a second agent, are provided. In an embodiment, the second agent is budenoside, epidermal growth factor, a corticosteroid, cyclosporin, sulfasalazine, an aminosalicylate, 6-mercaptopurine, azathioprine, metronidazole, a lipoxygenase inhibitor, mesalamine, olsalazine, balsalazide, an antioxidant, a thromboxane inhibitor, an IL-1 receptor antagonist, an anti-IL-1β mAbs, an anti-IL-6 or IL-6 receptor mAb, a growth factor, an elastase inhibitor, a pyridinyl-imidazole compound, an antibody or agonist of TNF, LT, IL-1, IL-2, IL-6, IL-7, IL-8, IL-12, IL-13, IL-15, IL-16, IL-18, IL-23, EMAP-II, GM-CSF, FGF, or PDGF, an antibody to CD2, CD3, CD4, CD8, CD-19, CD25, CD28, CD30, CD40, CD45, CD69, CD90 or a ligand thereof, methotrexate, cyclosporin, FK506, rapamycin, mycophenolate mofetil, leflunomide, an NSAID, ibuprofen, prednisolone, a phosphodiesterase inhibitor, an adenosine agonist, an antithrombotic agent, a complement inhibitor, an adrenergic agent, IRAK, NIK, IKK, p38, a MAP kinase inhibitor, an IL-1β converting enzyme inhibitor, a TNFα-converting enzyme inhibitor, a T-cell signalling inhibitor, a metalloproteinase inhibitor, sulfasalazine, azathioprine, a 6-mercaptopurine, an angiotensin converting enzyme inhibitor, a soluble cytokine receptor, a soluble p55 TNF receptor, a soluble p75 TNF receptor, sIL-1RI, sIL-1RII, sIL-6R, an antiinflammatory cytokine, IL-4, IL-10, IL-11, IL-13, or TGFβ. In a particular embodiment, the pharmaceutical compositions disclosed herein are administered to a patient by parenteral, subcutaneous, intramuscular, intravenous, intrarticular, intrabronchial, intraabdominal, intracapsular, intracartilaginous, intracavitary, intracelial, intracerebellar, intracerebroventricular, intracolic, intracervical, intragastric, intrahepatic, intramyocardial, intraosteal, intrapelvic, intrapericardiac, intraperitoneal, intrapleural, intraprostatic, intrapulmonary, intrarectal, intrarenal, intraretinal, intraspinal, intrasynovial, intrathoracic, intrauterine, intravesical, bolus, vaginal, rectal, buccal, sublingual, intranasal, or transdermal administration.

[0053] Anti-idiotype antibodies to the binding proteins disclosed herein are also provided. An anti-idiotype antibody includes any protein or peptide-containing molecule that comprises at least a portion of an immunoglobulin molecule such as, but not limited to, at least one complementarily determining region (CDR) of a heavy or light chain or a ligand binding portion thereof, a heavy chain or light chain variable region, a heavy chain or light chain constant region, a framework region, or any portion thereof, that can be incorporated into a binding protein provided herein.

[0054] A method of determining the presence, amount or concentration of TNFα and IL-13, TNFα and PGE2, or TNFα and NGF, or fragment thereof, in a test sample is provided. The method comprises assaying the test sample for the antigen, or fragment thereof, by an immunoassay. The immunoassay (i) employs at least one binding protein and at least one detectable label and (ii) comprises comparing a signal generated by the detectable label as a direct or indirect indication of the presence, amount or concentration of the antigen, or fragment thereof, in the test sample to a signal generated as a direct or indirect indication of the presence, amount or concentration of the antigen, or fragment thereof, in a control or a calibrator. The calibrator is optionally part of a series of calibrators in which each of the calibrators differs from the other calibrators in the series by the concentration of the antigen, or fragment thereof. The method can comprise (i) contacting the test sample with at least one capture agent, which binds to an epitope on the antigen, or fragment thereof, so as to form a capture agent/antigen, or fragment thereof, complex, (ii) contacting the capture agent/antigen, or fragment thereof, complex with at least one detection agent, which comprises a detectable label and binds to an epitope on the antigen, or fragment thereof, that is not bound by the capture agent, to form a capture agent/antigen, or fragment thereof/detection agent complex, and (iii) determining the presence, amount or concentration of the antigen, or fragment thereof, in the test sample based on the signal generated by the detectable label in the capture agent/antigen, or fragment thereof/detection agent complex formed in (ii), wherein at least one capture agent and/or at least one detection agent is the at least one binding protein.

[0055] Alternatively, the method can comprise (i) contacting the test sample with at least one capture agent, which binds to an epitope on the antigen, or fragment thereof, so as to form a capture agent/antigen, or fragment thereof, complex, and simultaneously or sequentially, in either order, contacting the test sample with detectably labeled antigen, or fragment thereof, which can compete with any antigen, or fragment thereof, in the test sample for binding to the at least one capture agent, wherein any antigen, or fragment thereof, present in the test sample and the detectably labeled antigen compete with each other to form a capture agent/antigen, or fragment thereof, complex and a capture agent/detectably labeled antigen, or fragment thereof, complex, respectively, and (ii) determining the presence, amount or concentration of the antigen, or fragment thereof, in the test sample based on the signal generated by the detectable label in the capture agent/detectably labeled antigen, or fragment thereof, complex formed in (ii), wherein at least one capture agent is the at least one binding protein and wherein the signal generated by the detectable label in the capture agent/detectably labeled antigen, or fragment thereof, complex is inversely proportional to the amount or concentration of antigen, or fragment thereof, in the test sample.

[0056] The test sample can be from a patient, in which case the method can further comprise diagnosing, prognosticating, or assessing the efficacy of therapeutic/prophylactic treatment of the patient. If the method further comprises assessing the efficacy of therapeutic/prophylactic treatment of the patient, the method optionally further comprises modifying the therapeutic/prophylactic treatment of the patient as needed to improve efficacy. The method can be adapted for use in an automated system or a semi-automated system. Accordingly, the methods described herein also can be used to determine whether or not a subject has or is at risk of developing a given disease, disorder or condition. Specifically, such a method can comprise the steps of: (a) determining the concentration or amount in a test sample from a subject of analyte, or fragment thereof, (e.g., using the methods described herein, or methods known in the art); and (b) comparing the concentration or amount of analyte, or fragment thereof, determined in step (a) with a predetermined level, wherein, if the concentration or amount of analyte determined in step (a) is favorable with respect to a predetermined level, then the subject is determined not to have or be at risk for a given disease, disorder or condition. However, if the concentration or amount of analyte determined in step (a) is unfavorable with respect to the predetermined level, then the subject is determined to have or be at risk for a given disease, disorder or condition.

[0057] Additionally, provided herein is method of monitoring the progression of disease in a subject. Optimally the method comprising the steps of: (a) determining the concentration or amount in a test sample from a subject of analyte; (b) determining the concentration or amount in a later test sample from the subject of analyte; and (c) comparing the concentration or amount of analyte as determined in step (b) with the concentration or amount of analyte determined in step (a), wherein if the concentration or amount determined in step (b) is unchanged or is unfavorable when compared to the concentration or amount of analyte determined in step (a), then the disease in the subject is determined to have continued, progressed or worsened. By comparison, if the concentration or amount of analyte as determined in step (b) is favorable when compared to the concentration or amount of analyte as determined in step (a), then the disease in the subject is determined to have discontinued, regressed or improved.

[0058] Optionally, the method further comprises comparing the concentration or amount of analyte as determined in step (b), for example, with a predetermined level. Further, optionally the method comprises treating the subject with one or more pharmaceutical compositions for a period of time if the comparison shows that the concentration or amount of analyte as determined in step (b), for example, is unfavorably altered with respect to the predetermined level.

[0059] Also provided is a kit for assaying a test sample for TNFα and IL-13, TNFα and PGE2, or TNFα and NGF, or fragment thereof. The kit comprises at least one component for assaying the test sample for an antigen, or fragment thereof, and instructions for assaying the test sample for an antigen, or fragment thereof, wherein the at least one component includes at least one composition comprising the binding protein disclosed herein, wherein the binding protein is optionally detectably labeled.

### BRIEF DESCRIPTION OF THE DRAWINGS

[0060] FIG. 1 is a schematic representation of Dual Variable Domain (DVD) binding protein construct according to certain embodiments of the present disclosure.

### DETAILED DESCRIPTION

[0061] Multivalent and/or multispecific binding proteins capable of binding TNFα and IL-13, TNFα and PGE2, or TNFα and NGF are provided. Dual variable domain binding proteins (DVD binding proteins) or dual variable domain immunoglobulins (DVD-Ig™), and pharmaceutical compositions thereof, as well as nucleic acids, recombinant expression vectors and host cells for making such DVD binding proteins are also provided. Methods of using the DVD binding proteins to detect specific antigens, either in vitro or in vivo are also provided.

[0062] Unless otherwise defined herein, scientific and technical terms used herein have the meanings that are commonly understood by those of ordinary skill in the art. In the event of any latent ambiguity, definitions provided herein take precedent over any dictionary or extrinsic definition. Unless otherwise required by context, singular terms shall include pluralities and plural terms shall include the singular. The use of “or” means “and/or” unless stated otherwise. The use of the term “including”, as well as other forms, such as “includes” and “included”, is not limiting.

[0063] Generally, nomenclatures used in connection with cell and tissue culture, molecular biology, immunology, microbiology, genetics and protein and nucleic acid chemistry and hybridization described herein are those well known and commonly used in the art. The methods and techniques provided herein are generally performed according to conventional methods well known in the art and as described in various general and more specific references that are cited and discussed throughout the present specification unless otherwise indicated. Enzymatic reactions and purification techniques are performed according to manufacturer's specifications, as commonly accomplished in the art or as described herein. The nomenclatures used in connection with, and the laboratory procedures and techniques of, analytical chemistry, synthetic organic chemistry, and medicinal and pharmaceutical chemistry described herein are those well known and commonly used in the art. Standard techniques are used for chemical syntheses, chemical analyses, pharmaceutical preparation, formulation, and delivery, and treatment of patients.

[0064] That the disclosure may be more readily understood, select terms are defined below.

[0065] The term “antibody” refers to an immunoglobulin (Ig) molecule, which is generally comprised of four polypeptide chains, two heavy (H) chains and two light (L) chains, or a functional fragment, mutant, variant, or derivative thereof, that retains the epitope binding features of an Ig molecule. Such fragment, mutant, variant, or derivative antibody formats are known in the art. In an embodiment of a full-length antibody, each heavy chain is comprised of a heavy chain variable region (VH) and a heavy chain constant region (CH). The CH is comprised of three domains, CH1, CH2 and CH3. Each light chain is comprised of a light chain variable region (VL) and a light chain constant region (CL). The CL is comprised of a single CL domain. The VH and VL can be further subdivided into regions of hypervariability, termed complementarity determining regions (CDRs), interspersed with regions that are more conserved, termed framework regions (FRs). Generally, each VH and VL is composed of three CDRs and four FRs, arranged from amino-terminus to carboxy-terminus in the following order: FR1, CDR1, FR2, CDR2, FR3, CDR3, and FR4. Immunoglobulin molecules can be of any type (e.g., IgG, IgE, IgM, IgD, IgA and IgY), class (e.g., IgG1, IgG2, IgG3, IgG4, IgA1 and IgA2), or subclass.

[0066] The term “bispecific antibody” refers to an antibody that binds one antigen (or epitope) on one of its two binding arms (one pair of HC/LC), and binds a different antigen (or epitope) on its second binding arm (a different pair of HC/LC). A bispecific antibody has two distinct antigen binding arms (in both specificity and CDR sequences), and is monovalent for each antigen to which it binds. Bispecific antibodies include those generated by quadroma technology (Milstein and Cuello (1983) Nature 305(5934): 537-40), by chemical conjugation of two different monoclonal antibodies (Staerz et al. (1985) Nature 314(6012): 628-31), or by knob-into-hole or similar approaches which introduces mutations in the Fc region (Holliger et al. (1993) Proc. Natl. Acad. Sci. USA 90(14): 6444-6448).

[0067] An “affinity matured” antibody is an antibody with one or more alterations in one or more CDRs thereof which result an improvement in the affinity of the antibody for antigen, compared to a parent antibody which does not possess those alteration(s). Exemplary affinity matured antibodies will have nanomolar or even picomolar affinities for the target antigen. Affinity matured antibodies are produced by procedures known in the art. Marks et al. (1992) BioTechnology 10:779-783 describes affinity maturation by VH and VL domain shuffling. Random mutagenesis of CDR and/or framework residues is described by Barbas et al. (1994) Proc. Nat. Acad. Sci. USA 91:3809-3813; Schier et al. (1995) Gene 169:147-155; Yelton et al. (1995) J. Immunol. 155:1994-2004; Jackson et al. (1995) J. Immunol. 154(7):3310-9; Hawkins et al. (1992) J. Mol. Biol. 226:889-896 and mutation at selective mutagenesis positions, contact or hypermutation positions with an activity enhancing amino acid residue as described in U.S. Pat. No. 6,914,128.

[0068] The term “CDR-grafted antibody” refers to an antibody that comprises heavy and light chain variable region sequences in which the sequences of one or more of the CDR regions of VH and/or VL are replaced with CDR sequences of another antibody. For example, the two antibodies can be from different species, such as antibodies having murine heavy and light chain variable regions in which one or more of the murine CDRs has been replaced with human CDR sequences.

[0069] The term “humanized antibody” refers to an antibody from a non-human species that has been altered to be more “human-like”, i.e., more similar to human germline sequences. One type of humanized antibody is a CDR-grafted antibody, in which non-human CDR sequences are introduced into human VH and VL sequences to replace the corresponding human CDR sequences. A “humanized antibody” is also an antibody or a variant, derivative, analog or fragment thereof that comprises framework region (FR) sequences having substantially (e.g., at least 80%, at least 85%, at least 90%, at least 95%, at least 98% or at least 99% identity to) the amino acid sequence of a human antibody and at least one CDR having substantially the amino acid sequence of a non-human antibody. A humanized antibody may comprise substantially all of at least one, and typically two, variable domains (Fab, Fab′, F(ab′)2, FabC, Fv) in which the sequence of all or substantially all of the CDR regions correspond to those of a non-human immunoglobulin (i.e., donor antibody) and the sequence of all or substantially all of the FR regions are those of a human immunoglobulin. The humanized antibody also may include the CH1, hinge, CH2, CH3, and CH4 regions of the heavy chain. In an embodiment, a humanized antibody also comprises at least a portion of a human immunoglobulin Fc region. In some embodiments, a humanized antibody only contains a humanized light chain. In some embodiments, a humanized antibody only contains a humanized heavy chain. In some embodiments, a humanized antibody only contains a humanized variable domain of a light chain and/or humanized variable domain of a heavy chain. In some embodiments, a humanized antibody contains a light chain as well as at least the variable domain of a heavy chain. In some embodiments, a humanized antibody contains a heavy chain as well as at least the variable domain of a light chain.

[0070] The terms “dual variable domain binding protein” and “dual variable domain immunoglobulin” refer to a binding protein that has two variable domains in each of its two binding arms (e.g., a pair of HC/LC) (see PCT Publication No. WO 02/02773), each of which is able to bind to an antigen. In an embodiment, each variable domain binds different antigens or epitopes. In another embodiment, each variable domain binds the same antigen or epitope. In another embodiment, a dual variable domain binding protein has two identical antigen binding arms, with identical specificity and identical CDR sequences, and is bivalent for each antigen to which it binds. In an embodiment, the DVD binding proteins may be monospecific, i.e., capable of binding one antigen or multispecific, i.e., capable of binding two or more antigens. DVD binding proteins comprising two heavy chain DVD polypeptides and two light chain DVD polypeptides are referred to as a DVD-Ig™. In an embodiment, each half of a four chain DVD binding protein comprises a heavy chain DVD polypeptide, and a light chain DVD polypeptide, and two antigen binding sites. In an embodiment, each binding site comprises a heavy chain variable domain and a light chain variable domain with a total of 6 CDRs involved in antigen binding per antigen binding site.

[0071] The term “antiidiotypic antibody” refers to an antibody raised against the amino acid sequence of the antigen combining site of another antibody. Antiidiotypic antibodies may be administered to enhance an immune response against an antigen.

[0072] The term “biological activity” refers to any one or more biological properties of a molecule (whether present naturally as found in vivo, or provided or enabled by recombinant means). Biological properties include, but are not limited to, binding a receptor, inducing cell proliferation, inhibiting cell growth, inducing other cytokines, inducing apoptosis, and enzymatic activity.

[0073] The term “neutralizing” refers to counteracting the biological activity of an antigen when a binding protein specifically binds to the antigen. In an embodiment, the neutralizing binding protein binds to an antigen (e.g., a cytokine) and reduces its biologically activity by at least about 20%, 40%, 60%, 80%, 85% or more.

[0074] “Specificity” refers to the ability of a binding protein to selectively bind an antigen.

[0075] “Affinity” is the strength of the interaction between a binding protein and an antigen, and is determined by the sequence of the CDRs of the binding protein as well as by the nature of the antigen, such as its size, shape, and/or charge. Binding proteins may be selected for affinities that provide desired therapeutic end-points while minimizing negative side-effects. Affinity may be measured using methods known to one skilled in the art (US 20090311253).

[0076] The term “potency” refers to the ability of a binding protein to achieve a desired effect, and is a measurement of its therapeutic efficacy. Potency may be assessed using methods known to one skilled in the art (US 20090311253).

[0077] The term “cross-reactivity” refers to the ability of a binding protein to bind a target other than that against which it was raised. Generally, a binding protein will bind its target tissue(s)/antigen(s) with an appropriately high affinity, but will display an appropriately low affinity for non-target normal tissues. Individual binding proteins are generally selected to meet two criteria. (1) Tissue staining appropriate for the known expression of the antibody target. (2) Similar staining pattern between human and tox species (mouse and cynomolgus monkey) tissues from the same organ. These and other methods of assessing cross-reactivity are known to one skilled in the art (US 20090311253).

[0078] The term “biological function” refers the specific in vitro or in vivo actions of a binding protein. Binding proteins may target several classes of antigens and achieve desired therapeutic outcomes through multiple mechanisms of action. Binding proteins may target soluble proteins, cell surface antigens, as well as extracellular protein deposits. Binding proteins may agonize, antagonize, or neutralize the activity of their targets. Binding proteins may assist in the clearance of the targets to which they bind, or may result in cytotoxicity when bound to cells. Portions of two or more antibodies may be incorporated into a multivalent format to achieve distinct functions in a single binding protein molecule. The in vitro assays and in vivo models used to assess biological function are known to one skilled in the art (US 20090311253).

[0079] A “stable” binding protein is one in which the binding protein essentially retains its physical stability, chemical stability and/or biological activity upon storage. A multivalent binding protein that is stable in vitro at various temperatures for an extended period of time is desirable. Methods of stabilizing binding proteins and assessing their stability at various temperatures are known to one skilled in the art (US 20090311253).

[0080] The term “solubility” refers to the ability of a protein to remain dispersed within an aqueous solution. The solubility of a protein in an aqueous formulation depends upon the proper distribution of hydrophobic and hydrophilic amino acid residues, and therefore, solubility can correlate with the production of correctly folded proteins. A person skilled in the art will be able to detect an increase or decrease in solubility of a binding protein using routine HPLC techniques and methods known to one skilled in the art (US 20090311253).

[0081] Binding proteins may be produced using a variety of host cells or may be produced in vitro, and the relative yield per effort determines the “production efficiency.” Factors influencing production efficiency include, but are not limited to, host cell type (prokaryotic or eukaryotic), choice of expression vector, choice of nucleotide sequence, and methods employed. The materials and methods used in binding protein production, as well as the measurement of production efficiency, are known to one skilled in the art (US 20090311253).

[0082] The term “immunogenicity” means the ability of a substance to induce an immune response. Administration of a therapeutic binding protein may result in a certain incidence of an immune response. Potential elements that might induce immunogenicity in a multivalent format may be analyzed during selection of the parental antibodies, and steps to reduce such risk can be taken to optimize the parental antibodies prior to incorporating their sequences into a multivalent binding protein format. Methods of reducing the immunogenicity of antibodies and binding proteins are known to one skilled in the art (US 20090311253).

[0083] The terms “label” and “detectable label” mean a moiety attached to a member of a specific binding pair, such as an antibody or its analyte to render a reaction (e.g., binding) between the members of the specific binding pair, detectable. The labeled member of the specific binding pair is referred to as “detectably labeled.” Thus, the term “labeled binding protein” refers to a protein with a label incorporated that provides for the identification of the binding protein. In an embodiment, the label is a detectable marker that can produce a signal that is detectable by visual or instrumental means, e.g., incorporation of a radiolabeled amino acid or attachment to a polypeptide of biotinyl moieties that can be detected by marked avidin (e.g., streptavidin containing a fluorescent marker or enzymatic activity that can be detected by optical or colorimetric methods). Examples of labels for polypeptides include, but are not limited to, the following: radioisotopes or radionuclides (e.g., ³H, ¹⁴C, ³⁵S, ⁹⁰Y, ⁹⁹Tc, ¹¹¹In, ¹²⁵I, ¹³¹I, ¹⁷⁷Lu, ¹⁶⁶Ho, or ¹⁵³Sm); chromogens, fluorescent labels (e.g., FITC, rhodamine, lanthanide phosphors), enzymatic labels (e.g., horseradish peroxidase, luciferase, alkaline phosphatase); chemiluminescent markers; biotinyl groups; predetermined polypeptide epitopes recognized by a secondary reporter (e.g., leucine zipper pair sequences, binding sites for secondary antibodies, metal binding domains, epitope tags); and magnetic agents, such as gadolinium chelates. Representative examples of labels commonly employed for immunoassays include moieties that produce light, e.g., acridinium compounds, and moieties that produce fluorescence, e.g., fluorescein. In this regard, the moiety itself may not be detectably labeled but may become detectable upon reaction with yet another moiety.

[0084] The term “conjugate” refers to a binding protein, such as an antibody, that is chemically linked to a second chemical moiety, such as a therapeutic or cytotoxic agent. The term “agent” includes a chemical compound, a mixture of chemical compounds, a biological macromolecule, or an extract made from biological materials. In an embodiment, the therapeutic or cytotoxic agents include, but are not limited to, pertussis toxin, taxol, cytochalasin B, gramicidin D, ethidium bromide, emetine, mitomycin, etoposide, tenoposide, vincristine, vinblastine, colchicin, doxorubicin, daunorubicin, dihydroxy anthracin dione, mitoxantrone, mithramycin, actinomycin D, 1-dehydrotestosterone, glucocorticoids, procaine, tetracaine, lidocaine, propranolol, and puromycin and analogs or homologs thereof. When employed in the context of an immunoassay, the conjugate antibody may be a detectably labeled antibody used as the detection antibody.

[0085] The terms “crystal” and “crystallized” refer to a binding protein (e.g., an antibody), or antigen binding portion thereof, that exists in the form of a crystal. Crystals are one form of the solid state of matter, which is distinct from other forms such as the amorphous solid state or the liquid crystalline state. Crystals are composed of regular, repeating, three-dimensional arrays of atoms, ions, molecules (e.g., proteins such as antibodies), or molecular assemblies (e.g., antigen/antibody complexes). These three-dimensional arrays are arranged according to specific mathematical relationships that are well-understood in the field. The fundamental unit, or building block, that is repeated in a crystal is called the asymmetric unit. Repetition of the asymmetric unit in an arrangement that conforms to a given, well-defined crystallographic symmetry provides the “unit cell” of the crystal. Repetition of the unit cell by regular translations in all three dimensions provides the crystal. See Giege, R. and Ducruix, A. Barrett, CRYSTALLIZATION OF NUCLEIC ACIDS AND PROTEINS, A PRACTICAL APPROACH, 2nd ea., pp. 20 1-16, Oxford University Press, New York, N.Y., (1999).

[0086] The term “vector” refers to a nucleic acid molecule capable of transporting another nucleic acid to which it has been linked. One type of vector is a “plasmid”, which refers to a circular double stranded DNA loop into which additional DNA segments may be ligated. Another type of vector is a viral vector, wherein additional DNA segments may be ligated into the viral genome. Other vectors include RNA vectors. Certain vectors are capable of autonomous replication in a host cell into which they are introduced (e.g., bacterial vectors having a bacterial origin of replication and episomal mammalian vectors). Other vectors (e.g., non-episomal mammalian vectors) can be integrated into the genome of a host cell upon introduction into the host cell, and thereby are replicated along with the host genome. Certain vectors are capable of directing the expression of genes to which they are operatively linked. Such vectors are referred to herein as “recombinant expression vectors” (or simply, “expression vectors”). In general, expression vectors of utility in recombinant DNA techniques are often in the form of plasmids. In the present specification, “plasmid” and “vector” may be used interchangeably as the plasmid is the most commonly used form of vector. However, other forms of expression vectors are also included, such as viral vectors (e.g., replication defective retroviruses, adenoviruses and adeno-associated viruses), which serve equivalent functions. A group of pHybE vectors (U.S. Patent Application Ser. No. 61/021,282) were used for parental antibody and DVD-binding protein cloning. V1, derived from pJP183; pHybE-hCg1,z,non-a V2, was used for cloning of antibody and DVD heavy chains with a wildtype constant region. V2, derived from pJP191; pHybE-hCk V3, was used for cloning of antibody and DVD light chains with a kappa constant region. V3, derived from pJP192; pHybE-hCl V2, was used for cloning of antibody and DVDs light chains with a lambda constant region. V4, built with a lambda signal peptide and a kappa constant region, was used for cloning of DVD light chains with a lambda-kappa hybrid V domain. V5, built with a kappa signal peptide and a lambda constant region, was used for cloning of DVD light chains with a kappa-lambda hybrid V domain. V7, derived from pJP183; pHybE-hCg1,z,non-a V2, was used for cloning of antibody and DVD heavy chains with a (234,235 AA) mutant constant region.

[0087] The terms “recombinant host cell” or “host cell” refer to a cell into which exogenous DNA has been introduced. Such terms refer not only to the particular subject cell, but to the progeny of such a cell. Because certain modifications may occur in succeeding generations due to either mutation or environmental influences, such progeny may not, in fact, be identical to the parent cell, but are still included within the scope of the term “host cell” as used herein. In an embodiment, host cells include prokaryotic and eukaryotic cells. In an embodiment, eukaryotic cells include protist, fungal, plant and animal cells. In another embodiment, host cells include but are not limited to the prokaryotic cell line E. Coli; mammalian cell lines CHO, HEK 293, COS, NSO, SP2 and PER.C6; the insect cell line Sf9; and the fungal cell Saccharomyces cerevisiae.

[0088] The term “transfection” encompasses a variety of techniques commonly used for the introduction of exogenous nucleic acid (e.g., DNA) into a host cell, e.g., electroporation, calcium-phosphate precipitation, DEAE-dextran transfection and the like.

[0089] The term “cytokine” refers to a protein released by one cell population that acts on another cell population as an intercellular mediator. The term “cytokine” includes proteins from natural sources or from recombinant cell culture and biologically active equivalents of the native sequence cytokines.

[0090] The term “biological sample” means a quantity of a substance from a living thing or formerly living thing. Such substances include, but are not limited to, blood, (e.g., whole blood), plasma, serum, urine, amniotic fluid, synovial fluid, endothelial cells, leukocytes, monocytes, other cells, organs, tissues, bone marrow, lymph nodes and spleen.

[0091] The term “component” refers to an element of a composition. In relation to a diagnostic kit, for example, a component may be a capture antibody, a detection or conjugate antibody, a control, a calibrator, a series of calibrators, a sensitivity panel, a container, a buffer, a diluent, a salt, an enzyme, a co-factor for an enzyme, a detection reagent, a pretreatment reagent/solution, a substrate (e.g., as a solution), a stop solution, and the like that can be included in a kit for assay of a test sample. Thus, a “component” can include a polypeptide or other analyte as above, that is immobilized on a solid support, such as by binding to an anti-analyte (e.g., anti-polypeptide) antibody. Some components can be in solution or lyophilized for reconstitution for use in an assay.

[0092] “Control” refers to a composition known to not analyte (“negative control”) or to contain analyte (“positive control”). A positive control can comprise a known concentration of analyte. “Control,” “positive control,” and “calibrator” may be used interchangeably herein to refer to a composition comprising a known concentration of analyte. A “positive control” can be used to establish assay performance characteristics and is a useful indicator of the integrity of reagents (e.g., analytes).

[0093] “Predetermined cutoff” and “predetermined level” refer generally to an assay cutoff value that is used to assess diagnostic/prognostic/therapeutic efficacy results by comparing the assay results against the predetermined cutoff/level, where the predetermined cutoff/level already has been linked or associated with various clinical parameters (e.g., severity of disease, progression/nonprogression/improvement, etc.). While the present disclosure may provide exemplary predetermined levels, it is well-known that cutoff values may vary depending on the nature of the immunoassay (e.g., antibodies employed, etc.). It further is well within the ordinary skill of one in the art to adapt the disclosure herein for other immunoassays to obtain immunoassay-specific cutoff values for those other immunoassays based on this disclosure. Whereas the precise value of the predetermined cutoff/level may vary between assays, correlations as described herein (if any) may be generally applicable.

[0094] “Pretreatment reagent,” e.g., lysis, precipitation and/or solubilization reagent, as used in a diagnostic assay as described herein is one that lyses any cells and/or solubilizes any analyte that is/are present in a test sample. Pretreatment is not necessary for all samples, as described further herein. Among other things, solubilizing the analyte (e.g., polypeptide of interest) may entail release of the analyte from any endogenous binding proteins present in the sample. A pretreatment reagent may be homogeneous (not requiring a separation step) or heterogeneous (requiring a separation step). With use of a heterogeneous pretreatment reagent there is removal of any precipitated analyte binding proteins from the test sample prior to proceeding to the next step of the assay.

[0095] “Quality control reagents” in the context of immunoassays and kits described herein, include, but are not limited to, calibrators, controls, and sensitivity panels. A “calibrator” or “standard” typically is used (e.g., one or more, such as a plurality) in order to establish calibration (standard) curves for interpolation of the concentration of an analyte, such as an antibody or an analyte. Alternatively, a single calibrator, which is near a predetermined positive/negative cutoff, can be used. Multiple calibrators (i.e., more than one calibrator or a varying amount of calibrator(s)) can be used in conjunction so as to comprise a “sensitivity panel.”

[0096] The term “specific binding partner” is a member of a specific binding pair. A specific binding pair comprises two different molecules that specifically bind to each other through chemical or physical means. Therefore, in addition to antigen and antibody specific binding, other specific binding pairs can include biotin and avidin (or streptavidin), carbohydrates and lectins, complementary nucleotide sequences, effector and receptor molecules, cofactors and enzymes, enzyme inhibitors and enzymes, and the like. Furthermore, specific binding pairs can include members that are analogs of the original specific binding members, for example, an analyte-analog. Immunoreactive specific binding members include antigens, antigen fragments, and antibodies, including monoclonal and polyclonal antibodies as well as complexes, fragments, and variants (including fragments of variants) thereof, whether isolated or recombinantly produced.

[0097] The term “Fc region” defines the C-terminal region of an immunoglobulin heavy chain, which may be generated by papain digestion of an intact antibody. The Fc region may be a native sequence Fc region or a variant Fc region. The Fc region of an immunoglobulin generally comprises two constant domains, a CH2 domain and a CH3 domain, and optionally comprises a CH4 domain. Replacements of amino acid residues in the Fc portion to alter antibody effector function are known in the art (e.g., U.S. Pat. Nos. 5,648,260 and 5,624,821). The Fc region mediates several important effector functions, e.g., cytokine induction, antibody dependent cell mediated cytotoxicity (ADCC), phagocytosis, complement dependent cytotoxicity (CDC), and half-life/clearance rate of antibody and antigen-antibody complexes. In some cases these effector functions are desirable for a therapeutic immunoglobulin but in other cases might be unnecessary or even deleterious, depending on the therapeutic objectives.

[0098] The term “antigen-binding portion” of a binding protein means one or more fragments of a binding protein (e.g., an antibody) that retain the ability to specifically bind to an antigen. The antigen-binding portion of a binding protein can be performed by fragments of a full-length antibody, as well as bispecific, dual specific, or multi-specific formats; specifically binding to two or more different antigens. Examples of binding fragments encompassed within the term “antigen-binding portion” of an binding protein include (i) an Fab fragment, a monovalent fragment consisting of the VL, VH, CL and CH1 domains; (ii) an F(ab′)₂ fragment, a bivalent fragment comprising two Fab fragments linked by a disulfide bridge at the hinge region; (iii) an Fd fragment consisting of the VH and CH1 domains; (iv) an Fv fragment consisting of the VL and VH domains of a single arm of an antibody, (v) a dAb fragment, which comprises a single variable domain; and (vi) an isolated complementarity determining region (CDR). Furthermore, although the two domains of the Fv fragment, VL and VH, encoded by separate genes, they can be joined, using recombinant methods, by a synthetic linker that enables them to be made as a single protein chain in which the VL and VH regions pair to form monovalent molecules (known as single chain Fv (scFv). Such single chain antibodies are also intended to be encompassed within the term “antigen-binding portion” of an antibody. Other forms of single chain antibodies, such as diabodies are also encompassed. In addition, single chain antibodies also include “linear antibodies” comprising a pair of tandem Fv segments (VH-CH1-VH-CH1) which, together with complementary light chain polypeptides, form a pair of antigen binding regions.

[0099] The term “multivalent binding protein” means a binding protein comprising two or more antigen binding sites. In an embodiment, the multivalent binding protein is engineered to have three or more antigen binding sites, and is not a naturally occurring antibody. The term “multispecific binding protein” refers to a binding protein capable of binding two or more related or unrelated targets. In an embodiment, the dual variable domain (DVD) binding proteins provided herein comprise two or more antigen binding sites and are tetravalent or multivalent binding proteins.

[0100] The term “linker” means an amino acid residue or a polypeptide comprising two or more amino acid residues joined by peptide bonds that are used to link two polypeptides (e.g., two VH or two VL domains). Such linker polypeptides are well known in the art (see, e.g., Holliger et al. (1993) Proc. Natl. Acad. Sci. USA 90:6444-6448; Poljak et al. (1994) Structure 2:1121-1123).

[0101] The terms “Kabat numbering”, “Kabat definitions” and “Kabat labeling” are used interchangeably herein. These terms, which are recognized in the art, refer to a system of numbering amino acid residues which are more variable (i.e., hypervariable) than other amino acid residues in the heavy and light chain variable regions of an antibody, or an antigen binding portion thereof (Kabat et al. (1971) Ann. NY Acad. Sci. 190:382-391 and, Kabat et al. (1991) Sequences of Proteins of Immunological Interest, Fifth Edition, U.S. Department of Health and Human Services, NIH Publication No. 91-3242). For the heavy chain variable region, the hypervariable region ranges from amino acid positions 31 to 35 for CDR1, amino acid positions 50 to 65 for CDR2, and amino acid positions 95 to 102 for CDR3. For the light chain variable region, the hypervariable region ranges from amino acid positions 24 to 34 for CDR1, amino acid positions 50 to 56 for CDR2, and amino acid positions 89 to 97 for CDR3.

[0102] The term “CDR” means a complementarity determining region within an immunoglobulin variable region sequence. There are three CDRs in each of the variable regions of the heavy chain and the light chain, which are designated CDR1, CDR2 and CDR3, for each of the heavy and light chain variable regions. The term “CDR set” refers to a group of three CDRs that occur in a single variable region capable of binding the antigen. The exact boundaries of these CDRs have been defined differently according to different systems. The system described by Kabat (Kabat et al. (1987) and (1991)) not only provides an unambiguous residue numbering system applicable to any variable region of an antibody, but also provides precise residue boundaries defining the three CDRs. These CDRs may be referred to as Kabat CDRs. Chothia and coworkers (Chothia and Lesk (1987) J. Mol. Biol. 196:901-917; Chothia et al. (1989) Nature 342:877-883) found that certain sub-portions within Kabat CDRs adopt nearly identical peptide backbone conformations, despite having great diversity at the level of amino acid sequence. These sub-portions were designated as L1, L2 and L3 or H1, H2 and H3 where the “L” and the “H” designates the light chain and the heavy chain regions, respectively. These regions may be referred to as Chothia CDRs, which have boundaries that overlap with Kabat CDRs. Other boundaries defining CDRs overlapping with the Kabat CDRs have been described by Padlan (1995) FASEB J. 9:133-139 and MacCallum (1996) J. Mol. Biol. 262(5):732-45). Still other CDR boundary definitions may not strictly follow one of the herein systems, but will nonetheless overlap with the Kabat CDRs, although they may be shortened or lengthened in light of prediction or experimental findings that particular residues or groups of residues or even entire CDRs do not significantly impact antigen binding. The methods used herein may utilize CDRs defined according to any of these systems, although certain embodiments use Kabat or Chothia defined CDRs.

[0103] The term “epitope” means a region of an antigen that is bound by a binding protein, e.g., a polypeptide and/or other determinant capable of specific binding to an immunoglobulin or T-cell receptor. In certain embodiments, epitope determinants include chemically active surface groupings of molecules such as amino acids, sugar side chains, phosphoryl, or sulfonyl, and, in certain embodiments, may have specific three dimensional structural characteristics, and/or specific charge characteristics. In an embodiment, an epitope comprises the amino acid residues of a region of an antigen (or fragment thereof) known to bind to the complementary site on the specific binding partner. An antigenic fragment can contain more than one epitope. In certain embodiments, a binding protein specifically binds an antigen when it recognizes its target antigen in a complex mixture of proteins and/or macromolecules. Binding proteins “bind to the same epitope” if the antibodies cross-compete (one prevents the binding or modulating effect of the other). In addition, structural definitions of epitopes (overlapping, similar, identical) are informative; and functional definitions encompass structural (binding) and functional (modulation, competition) parameters. Different regions of proteins may perform different functions. For example specific regions of a cytokine interact with its cytokine receptor to bring about receptor activation whereas other regions of the protein may be required for stabilizing the cytokine. To abrogate the negative effects of cytokine signaling, the cytokine may be targeted with a binding protein that binds specifically to the receptor interacting region(s), thereby preventing the binding of its receptor. Alternatively, a binding protein may target the regions responsible for cytokine stabilization, thereby designating the protein for degradation. The methods of visualizing and modeling epitope recognition are known to one skilled in the art (US 20090311253).

[0104] “Pharmacokinetics” refers to the process by which a drug is absorbed, distributed, metabolized, and excreted by an organism. To generate a multivalent binding protein molecule with a desired pharmacokinetic profile, parent monoclonal antibodies with similarly desired pharmacokinetic profiles are selected. The PK profiles of the selected parental monoclonal antibodies can be easily determined in rodents using methods known to one skilled in the art (US 20090311253).

[0105] “Bioavailability” refers to the amount of active drug that reaches its target following administration. Bioavailability is function of several of the previously described properties, including stability, solubility, immunogenicity and pharmacokinetics, and can be assessed using methods known to one skilled in the art (US 20090311253).

[0106] The term “surface plasmon resonance” means an optical phenomenon that allows for the analysis of real-time biospecific interactions by detection of alterations in protein concentrations within a biosensor matrix, for example using the BIAcore® system (BIAcore International AB, a GE Healthcare company, Uppsala, Sweden and Piscataway, N.J.). For further descriptions, see Jönsson et al. (1993) Ann. Biol. Clin. 51:19-26. The term “Kₒₙ” means the on rate constant for association of a binding protein (e.g., an antibody or DVD-Ig) to the antigen to form the, e.g., DVD-Ig/antigen complex. The term “Kₒₙ” also means “association rate constant”, or “ka”, as is used interchangeably herein. This value indicating the binding rate of a binding protein to its target antigen or the rate of complex formation between a binding protein, e.g., an antibody, and antigen also is shown by the equation below:

Antibody (“Ab”)+Antigen (“Ag”)→Ab-Ag

[0107] The term “K_{off}” means the off rate constant for dissociation, or “dissociation rate constant”, of a binding protein (e.g., an antibody or DVD-Ig) from the, e.g., DVD-Ig/antigen complex as is known in the art. This value indicates the dissociation rate of a binding protein, e.g., an antibody, from its target antigen or separation of Ab-Ag complex over time into free antibody and antigen as shown by the equation below:

Ab+Ag←Ab-Ag

[0108] The terms “K_{d}” and “equilibrium dissociation constant” means the value obtained in a titration measurement at equilibrium, or by dividing the dissociation rate constant (K_{off}) by the association rate constant (Kₒₙ). The association rate constant, the dissociation rate constant and the equilibrium dissociation constant, are used to represent the binding affinity of a binding protein (e.g., an antibody or DVD-Ig) to an antigen. Methods for determining association and dissociation rate constants are well known in the art. Using fluorescence-based techniques offers high sensitivity and the ability to examine samples in physiological buffers at equilibrium. Other experimental approaches and instruments such as a BIAcore® (biomolecular interaction analysis) assay, can be used (e.g., instrument available from BIAcore International AB, a GE Healthcare company, Uppsala, Sweden). Additionally, a KinExA® (Kinetic Exclusion Assay) assay, available from Sapidyne Instruments (Boise, Id.), can also be used.

[0109] The term “variant” means a polypeptide that differs from a given polypeptide in amino acid sequence by the addition (e.g., insertion), deletion, or conservative substitution of amino acids, but that retains the biological activity of the given polypeptide (e.g., a variant TNFα antibody can compete with anti-TNFα antibody for binding to TNFα). A conservative substitution of an amino acid, i.e., replacing an amino acid with a different amino acid of similar properties (e.g., hydrophilicity and degree and distribution of charged regions) is recognized in the art as typically involving a minor change. These minor changes can be identified, in part, by considering the hydropathic index of amino acids, as understood in the art (see, e.g., Kyte et al. (1982) J. Mol. Biol. 157: 105-132). The hydropathic index of an amino acid is based on a consideration of its hydrophobicity and charge. It is known in the art that amino acids of similar hydropathic indexes in a protein can be substituted and the protein still retains protein function. In one aspect, amino acids having hydropathic indexes of ±2 are substituted. The hydrophilicity of amino acids also can be used to reveal substitutions that would result in proteins retaining biological function. A consideration of the hydrophilicity of amino acids in the context of a peptide permits calculation of the greatest local average hydrophilicity of that peptide, a useful measure that has been reported to correlate well with antigenicity and immunogenicity (see, e.g., U.S. Pat. No. 4,554,101). Substitution of amino acids having similar hydrophilicity values can result in peptides retaining biological activity, for example immunogenicity, as is understood in the art. In one aspect, substitutions are performed with amino acids having hydrophilicity values within ±2 of each other. Both the hydrophobicity index and the hydrophilicity value of amino acids are influenced by the particular side chain of that amino acid. Consistent with that observation, amino acid substitutions that are compatible with biological function are understood to depend on the relative similarity of the amino acids, and particularly the side chains of those amino acids, as revealed by the hydrophobicity, hydrophilicity, charge, size, and other properties. The term “variant” also includes polypeptide or fragment thereof that has been differentially processed, such as by proteolysis, phosphorylation, or other post-translational modification, yet retains its biological activity or antigen reactivity, e.g., the ability to bind to TNFα. The term “variant” encompasses fragments of a variant unless otherwise defined. A variant may be 99%, 98%, 97%, 96%, 95%, 94%, 93%, 92%, 91%, 90%, 89%, 88%, 87%, 86%, 85%, 84%, 83%, 82%, 81%, 80%, 79%, 78%, 77%, 76%, or 75% identical to the wildtype sequence.

### I. Generation of Binding Proteins

[0110] Binding proteins capable of binding TNFα and IL-13, TNFα and PGE2, or TNFα and NGF and methods of making the same are provided. The binding protein can be generated using various techniques. Expression vectors, host cell and methods of generating the binding protein are provided and are well known in the art.

[0111] A. Generation of Parent Monoclonal Antibodies

[0112] The variable domains of the DVD binding protein can be obtained from parent antibodies, including polyclonal Abs and mAbs capable of binding antigens of interest. These antibodies may be naturally occurring or may be generated by recombinant technology. The person of ordinary skill in the art is well familiar with many methods for producing antibodies, including, but not limited to using hybridoma techniques, selected lymphocyte antibody method (SLAM), use of a phage, yeast, or RNA-protein fusion display or other library, immunizing a non-human animal comprising at least some of the human immunoglobulin locus, and preparation of chimeric, CDR-grafted, and humanized antibodies. See, e.g., US Patent Publication No. 20090311253 A1. Variable domains may also be prepared using affinity maturation techniques.

[0113] B. Criteria for Selecting Parent Monoclonal Antibodies

[0114] An embodiment is provided comprising selecting parent antibodies with at least one or more properties desired in the DVD binding protein molecule. In an embodiment, the desired property is one or more antibody parameters, such as, for example, antigen specificity, affinity to antigen, potency, biological function, epitope recognition, stability, solubility, production efficiency, immunogenicity, pharmacokinetics, bioavailability, tissue cross reactivity, or orthologous antigen binding. See, e.g., US Patent Publication No. 20090311253.

[0115] C. Construction of Binding Protein Molecules

[0116] The binding protein may be designed such that two different light chain variable domains (VL) from the two different parent monoclonal antibodies are linked in tandem directly or via a linker by recombinant DNA techniques, followed by the light chain constant domain CL. Similarly, the heavy chain comprises two different heavy chain variable domains (VH) linked in tandem, directly or via a linker, followed by the constant domain CH1 and Fc region (FIG. 1).

[0117] The variable domains can be obtained using recombinant DNA techniques from parent antibodies generated by any one of the methods described herein. In an embodiment, the variable domain is a murine heavy or light chain variable domain. In another embodiment, the variable domain is a CDR grafted or a humanized variable heavy or light chain domain. In an embodiment, the variable domain is a human heavy or light chain variable domain.

[0118] The linker sequence may be a single amino acid or a polypeptide sequence. In an embodiment, the choice of linker sequences is based on crystal structure analysis of several Fab molecules. There is a natural flexible linkage between the variable domain and the CH1/CL constant domain in Fab or antibody molecular structure. This natural linkage comprises approximately 10-12 amino acid residues, contributed by 4-6 residues from the C-terminus of a V domain and 4-6 residues from the N-terminus of a CL/CH1 domain. DVD-Ig binding proteins were generated using N-terminal 5-6 amino acid residues, or 11-12 amino acid residues, of CL or CH1 as a linker in the light chain and heavy chains, respectively. The N-terminal residues of CL or CH1 domains, particularly the first 5-6 amino acid residues, can adopt a loop conformation without strong secondary structures, and therefore can act as flexible linkers between the two variable domains. The N-terminal residues of CL or CH1 domains are natural extension of the variable domains, as they are part of the Ig sequences, and therefore their use minimizes to a large extent any immunogenicity potentially arising from the linkers and junctions.

[0119] In a further embodiment, of any of the heavy chain, light chain, two chain, or four chain embodiments, includes at least one linker comprising AKTTPKLEEGEFSEAR (SEQ ID NO: 1); AKTTPKLEEGEFSEARV (SEQ ID NO: 2); AKTTPKLGG (SEQ ID NO: 3); SAKTTPKLGG (SEQ ID NO: 4); SAKTTP (SEQ ID NO: 5); RADAAP (SEQ ID NO: 6); RADAAPTVS (SEQ ID NO: 7); RADAAAAGGPGS (SEQ ID NO: 8); RADAAAA(G₄S)₄ (SEQ ID NO: 9); SAKTTPKLEEGEFSEARV (SEQ ID NO: 10); ADAAP (SEQ ID NO: 11); ADAAPTVSIFPP (SEQ ID NO: 12); TVAAP (SEQ ID NO: 13); TVAAPSVFIFPP (SEQ ID NO: 14); QPKAAP (SEQ ID NO: 15); QPKAAPSVTLFPP (SEQ ID NO: 16); AKTTPP (SEQ ID NO: 17); AKTTPPSVTPLAP (SEQ ID NO: 18); AKTTAP (SEQ ID NO: 19); AKTTAPSVYPLAP (SEQ ID NO: 20); ASTKGP (SEQ ID NO: 21); ASTKGPSVFPLAP (SEQ ID NO: 22), GGGGSGGGGSGGGGS (SEQ ID NO: 23); GENKVEYAPALMALS (SEQ ID NO: 24); GPAKELTPLKEAKVS (SEQ ID NO: 25); or GHEAAAVMQVQYPAS (SEQ ID NO: 26); TVAAPSVFIFPPTVAAPSVFIFPP (SEQ ID NO: 27); ASTKGPSVFPLAPASTKGPSVFPLAP (SEQ ID NO: 28); GGGGSGGGGS (SEQ ID NO: 29); GGSGGGGSG (SEQ ID NO: 30); or G/S based sequences (e.g., G4S and G4S repeats; SEQ ID NO: 31). In an embodiment, X2 is an Fc region. In another embodiment, X2 is a variant Fc region.

[0120] Other linker sequences may include any sequence of any length of a CL/CH1 domain but not all residues of a CL/CH1 domain; for example the first 5-12 amino acid residues of a CL/CH1 domain; the light chain linkers can be from Cκ or Cλ; and the heavy chain linkers can be derived from CH1 of any isotype, including Cγ1, Cγ2, Cγ3, Cγ4, Cα1, Cα2, Cδ, Cε, and Cμ. Linker sequences may also be derived from other proteins such as Ig-like proteins (e.g., TCR, FcR, KIR); G/S based sequences (e.g., G4S repeats; SEQ ID NO: 31); hinge region-derived sequences; and other natural sequences from other proteins.

[0121] In an embodiment, a constant domain is linked to the two linked variable domains using recombinant DNA techniques. In an embodiment, a sequence comprising linked heavy chain variable domains is linked to a heavy chain constant domain and a sequence comprising linked light chain variable domains is linked to a light chain constant domain. In an embodiment, the constant domains are human heavy chain constant domains and human light chain constant domains respectively. In an embodiment, the DVD heavy chain is further linked to an Fc region. The Fc region may be a native sequence Fc region or a variant Fc region. In another embodiment, the Fc region is a human Fc region. In another embodiment, the Fc region includes Fc region from IgG1, IgG2, IgG3, IgG4, IgA, IgM, IgE, or IgD.

[0122] In another embodiment, two heavy chain DVD polypeptides and two light chain DVD polypeptides are combined to form a DVD binding protein. Tables 1A-1C list amino acid sequences of VH and VL regions of exemplary antibodies useful for treating disease. In an embodiment, a DVD comprising at least two of the VH and/or VL regions listed in Table 1, in any orientation, is provided. In some embodiments, VD1 and VD2 are independently chosen. Therefore, in some embodiments, VD1 and VD2 comprise the same SEQ ID NO and, in other embodiments, VD1 and VD2 comprise different SEQ ID NOS. The VH and VL domain sequences provided below comprise complementarity determining regions (CDRs) and framework sequences that are either known in the art or readily discernible using methods known in the art. In some embodiments, one or more of these CDRs and/or framework sequences are replaced, without loss of function, by other CDRs and/or framework sequences from binding proteins that are known in the art to bind to the same antigen.

TABLE 1
List of Amino Acid Sequences of VH and VL Regions of Antibodies for
Generating Binding Proteins, Including Multivalent Binding Proteins

| SEQ | ABT | | |
|---|---|---|---|
| ID | Unique | | Sequence |
| No. | ID | Protein region | 123456789012345678901234567890 |
| 32 | AB397VH | VH-IL13 (seq 1) | EVTLRESGPGLVKPTQTLTLTCTLYGFSLS |
| | | | TSDMGVDWIRQPPGKGLEWLAHIWWDDVKR |
| | | | YNPALKSRLTISKDTSKNQVVLKLTSVDPV |
| | | | DTATYYCARTVSSGYIYYAMDYWGQGTLVT |
| | | | VSS |
| 33 | AB397VL | VL-IL13 (seq 1) | DIQMTQSPSSLSASVGDRVTISCRASQDIR |
| | | | NYLNWYQQKPGKAPKLLIFYTSKLHSGVPS |
| | | | RFSGSGSGTDYTLTISSLQPEDIATYYCQQ |
| | | | GLTPPLTFGGGTKVEIKR |
| 34 | AB398VH | VH-IL13 (seq 2) | EVQLVQSGAEVKKPGASVKVSCKASGYTFT |
| | | | TYGVSWVRQAPGQGLEWMGEIYPGNYNTYY |
| | | | NEKFRGRVTMTTDTSTSTAYMELRSLRSDD |
| | | | TAVYYCARWRTSYFSDYGYFDYWGQGTTVT |
| | | | VSS |
| 35 | AB398VL | VL-IL13 (seq 2) | DVVMTQSPLSLPVTLGQPASISCRSSQSLV |
| | | | HSHGNTYLHWYQQRPGQSPRLLIYTVSNRF |
| | | | SGVPDRFSGSGSGTDFTLKISRVEAEDVGV |
| | | | YYCSQSTHVPYTFGGGTKVEIKR |
| 36 | AB399VH | VH-IL13 (seq 3) | EVQLVQSGAEVKKPGASVKVSCKASGYTFT |
| | | | SYWMHWVRQAPGQGLEWIGNINPKGGSNIY |
| | | | NEKFQGRVTMTRDTSISTAYMELSRLRSDD |
| | | | TAVYYCARLDYFGDSFDLWGQGTTVTVSS |
| 37 | AB399VL | VL-IL13 (seq 3) | DIQMTQSPSSLSASVGDRVTITCRASQGIR |
| | | | NYLNWYQQKPGKAPKLLIYYASNLEVGVPS |
| | | | RFSGSGSGTDYTLTISSLQPEDFATYYCQQ |
| | | | DNRFPYTFGGGTKVEIKR |
| 38 | AB436VH | VH-TNF (seq 1) | EVQLVESGGGLVQPGGSLRLSCAASGFTFS |
| | | | NYGVTWVRQAPGKGLEWVSMIWADGSTHYA |
| | | | SSVKGRFTISRDNSKNTLYLQMNSLRAEDT |
| | | | AVYYCAREWQHGPVAYWGQGTLVTVSS |
| 39 | AB436VL | VL-TNF (seq 1) | DIQMTQSPSSLSASVGDRVTITCRASQLVS |
| | | | SAVAWYQQKPGKAPKLLIYWASARHTGVPS |
| | | | RFSGSGSGTDFTLTISSLQPEDFATYYCQQ |
| | | | HYKTPFTFGQGTKLEIKR |
| 40 | AB437VH | VH-TNF (seq 2) | EVQLVESGGGLVQPGGSLRLSCAASGFTFS |
| | | | NYGVEWVRQAPGKGLEWVSGIWADGSTHYA |
| | | | DTVKSRFTISRDNSKNTLYLQMNSLRAEDT |
| | | | AVYYCAREWQHGPVAYWGQGTLVTVSS |
| 41 | AB437VL | VL-TNF (seq 2) | DIQMTQSPSSLSASVGDRVTITCKASQLVS |
| | | | SAVAWYQQKPGKAPKLLIYWASTLHTGVPS |
| | | | RFSGSGSGTDFTLTISSLQPEDFATYYCQQ |
| | | | HYRTPFTFGQGTKLEIKR |
| 42 | AB441VH | VH-TNF (seq 3) | EVQLVQSGAEVKKPGASVKVSCKASGYTFA |
| | | | NYGIIWVRQAPGQGLEWMGWINTYTGKPTY |
| | | | AQKFQGRVTMTTDTSTSTAYMELSSLRSED |
| | | | TAVYYCARKLFTTMDVTDNAMDYWGQGTTV |
| | | | TVSS |
| 43 | AB441VL | VL TNF (seq 3) | DIQMTQSPSSLSASVGDRVTITCRASQDIS |
| | | | QYLNWYQQKPGKAPKLLIYYTSRLQSGVPS |
| | | | RFSGSGSGTDFTLTISSLQPEDFATYFCQQ |
| | | | GNTWPPTFGQGTKLEIKR |
| 48 | AB444VH | VH-TNF (seq 3) | EVQLVQSGAEVKKPGASVKVSCKASGYTFN |
| | | | NYGIIWVRQAPGQGLEWMGWINTYTGKPTY |
| | | | AQKFQGRVTMTTDTSTSTAYMELSSLRSED |
| | | | TAVYYCARKLFNTVAVTDNAMDYWGQGTTV |
| | | | TVSS |
| 49 | AB444VL | VL-TNF (seq 3) | DIQMTQSPSSLSASVGDRVTITCRASQDIE |
| | | | NYLNWYQQKPGKAPKLLIYYTSRLQSGVPS |
| | | | RFSGSGSGTDFTLTISSLQPEDFATYFCQQ |
| | | | GNTQPPTFGQGTKLEIKR |
| 50 | AB048VH | VH-PGE2 (seq 1) | EVQLVQSGAEVKKPGASVKVSCKASGYTFT |
| | | | KYWLGWVRQAPGQGLEWMGDIYPGYDYTHY |
| | | | NEKFKDRVTLTTDTSTSTAYMELRSLRSDD |
| | | | TAVYYCARSDGSSTYWGQGTLVTVSS |
| 51 | AB048VL | VL-PGE2 (seq 1) | DVLMTQTPLSLPVTPGEPASISCTSSQNIV |
| | | | HSNGNTYLEWYLQKPGQSPQLLIYKVSNRF |
| | | | SGVPDRFSGSGSGTDFTLKISRVEAEDVGV |
| | | | YYCFQVSHVPYTFGGGTKVEIKR |
| 52 | AB131VH | VH-PGE2 | EVQLVESGGGLVQPGGSLRLSCAASGFSFS |
| | | (AB016) (seq 2) | KYWLGWVRQAPGKGLEWVSDIYPGYDYTHY |
| | | | NEKFKDRFTISADTSKNTAYLQMNSLRAED |
| | | | TAVYYCARSDGSSTYWGQGTLVTVSS |
| 53 | AB131VL | VL-PGE2 | DIQMTQSPSSLSASVGDRVTITCTSSQNIV |
| | | (AB016) (seq 2) | HSNGNTYLEWYQQKPGKAPKLLIYKVSNRF |
| | | | SGVPSRFSGSGSGTDFTLTISSLQPEDFAT |
| | | | YYCFQVSHVPYTFGQGTKVEIKR |
| 54 | AB135VH | VH-PGE2 | EVQLQQSGPELVTPGASVKISCKASGYTFT |
| | | (AB022) (seq 3) | KYWLGWVKQSHGKSLEWIGDIYPGYDYTHY |
| | | | NEKFKDTATLTVDKSSSIAYMEIRGLTSED |
| | | | SAVYYCARSDGSSTYWGQGTLVTVSA |
| 55 | AB135VL | VL-PGE2 | DVQMIQSPSSLSASLGDIVTMTCTSSQNIV |
| | | (AB022) (seq 3) | HSNGNTYLEWFQQKPGKAPKLLIYKVSNRF |
| | | | SGVPSRFSGSRYGTDFTLTISSLEDEDLAT |
| | | | YFCFQVSHVPYTFGGGTKLEIKR |
| 56 | AB267VH | VH-NGF | EVQLVESGGGLVQPGGSLRLSCAASGFSLT |
| | | | NNNVNWVRQAPGKGLEWVGGVWAGGATDYN |
| | | | SALKSRFTISRDNSKNTAYLQMNSLRAEDT |
| | | | AVYYCARDGGYSSSTLYAMDAWGQGTLVTV |
| | | | SS |
| 57 | AB267VL | VL-NGF | DIQMTQSPSSLSASVGDRVTITCRASEDIY |
| | | | NALAWYQQKPGKAPKLLIYNTDTLHTGVPS |
| | | | RFSGSGSGTDYTLTISSLQPEDFATYFCQH |
| | | | YFHYPRTFGQGTKVEIKR |

[0123] Detailed description of specific DVD binding proteins capable of binding specific targets, and methods of making the same, is provided in the Examples section below.

[0124] D. Production of Binding Proteins

[0125] The binding proteins provided herein may be produced by any of a number of techniques known in the art. For example, expression from host cells, wherein expression vector(s) encoding the DVD heavy and DVD light chains is (are) transfected into a host cell by standard techniques. Although it is possible to express the DVD binding proteins provided herein in either prokaryotic or eukaryotic host cells, DVD binding proteins are expressed in eukaryotic cells, for example, mammalian host cells, because such eukaryotic cells (and in particular mammalian cells) are more likely than prokaryotic cells to assemble and secrete a properly folded and immunologically active DVD binding protein.

[0126] In an exemplary system for recombinant expression of DVD proteins, a recombinant expression vector encoding both the DVD heavy chain and the DVD light chain is introduced into dhfr-CHO cells by calcium phosphate-mediated transfection. Within the recombinant expression vector, the DVD heavy and light chain genes are each operatively linked to CMV enhancer/AdMLP promoter regulatory elements to drive high levels of transcription of the genes. The recombinant expression vector also carries a DHFR gene, which allows for selection of CHO cells that have been transfected with the vector using methotrexate selection/amplification. The selected transformant host cells are cultured to allow for expression of the DVD heavy and light chains and intact DVD protein is recovered from the culture medium. Standard molecular biology techniques are used to prepare the recombinant expression vector, transfect the host cells, select for transformants, culture the host cells and recover the DVD protein from the culture medium. A method of synthesizing a DVD protein provided herein by culturing a host cell provided herein in a suitable culture medium until a DVD protein is synthesized is also provided. The method can further comprise isolating the DVD protein from the culture medium.

[0127] An important feature of DVD binding protein is that it can be produced and purified in a similar way as a conventional antibody. The production of DVD binding protein results in a homogeneous, single major product with desired dual-specific activity, without the need for sequence modification of the constant region or chemical modifications. Other previously described methods to generate “bi-specific”, “multi-specific”, and “multi-specific multivalent” full length binding proteins can lead to the intracellular or secreted production of a mixture of assembled inactive, mono-specific, multi-specific, multivalent, full length binding proteins, and multivalent full length binding proteins with a combination of different binding sites.

[0128] Surprisingly, the design of the “dual-specific multivalent full length binding proteins” provided herein leads to a dual variable domain light chain and a dual variable domain heavy chain that assemble primarily to the desired “dual-specific multivalent full length binding proteins”.

[0129] At least 50%, at least 75% and at least 90% of the assembled, and expressed dual variable domain immunoglobulin molecules are the desired dual-specific tetravalent protein, and therefore possess enhanced commercial utility. Thus, a method to express a dual variable domain light chain and a dual variable domain heavy chain in a single cell leading to a single primary product of a “dual-specific tetravalent full length binding protein” is provided.

[0130] Methods of expressing a dual variable domain light chain and a dual variable domain heavy chain in a single cell leading to a “primary product” of a “dual-specific tetravalent full length binding protein”, where the “primary product” is more than 50%, such as more than 75% and more than 90%, of all assembled protein, comprising a dual variable domain light chain and a dual variable domain heavy chain are provided.

### II. Uses of Binding Proteins

[0131] Given their ability to bind to two or more antigens the binding proteins provided herein can be used to detect the antigens (e.g., in a biological sample, such as serum or plasma), using a conventional immunoassay, such as an enzyme linked immunosorbent assays (ELISA), a radioimmunoassay (RIA), or tissue immunohistochemistry. The binding protein is directly or indirectly labeled with a detectable substance to facilitate detection of the bound or unbound antibody. Suitable detectable substances include various enzymes, prosthetic groups, fluorescent materials, luminescent materials and radioactive materials. Examples of suitable enzymes include horseradish peroxidase, alkaline phosphatase, β-galactosidase, or acetylcholinesterase; examples of suitable prosthetic group complexes include streptavidin/biotin and avidin/biotin; examples of suitable fluorescent materials include umbelliferone, fluorescein, fluorescein isothiocyanate, rhodamine, dichlorotriazinylamine fluorescein, dansyl chloride or phycoerythrin. An example of a luminescent material is luminol and examples of suitable radioactive materials include ³H, ¹⁴C, ³⁵S, ⁹⁰Y, ⁹⁹Tc, ¹¹¹In, ¹²⁵I, ¹³¹I, ¹⁷⁷Lu, ¹⁶⁶Ho, and ¹⁵³Sm.

[0132] In an embodiment, the binding proteins provided herein are capable of neutralizing the activity of their antigen targets both in vitro and in vivo. Accordingly, such binding proteins can be used to inhibit antigen activity, e.g., in a cell culture containing the antigens, in human subjects or in other mammalian subjects having the antigens with which a binding protein provided herein cross-reacts. In another embodiment, a method for reducing antigen activity in a subject suffering from a disease or disorder in which the antigen activity is detrimental is provided. A binding protein provided herein can be administered to a human subject for therapeutic purposes.

[0133] The term “a disorder in which antigen activity is detrimental” is intended to include diseases and other disorders in which the presence of the antigen in a subject suffering from the disorder has been shown to be or is suspected of being either responsible for the pathophysiology of the disorder or a factor that contributes to a worsening of the disorder. Accordingly, a disorder in which antigen activity is detrimental is a disorder in which reduction of antigen activity is expected to alleviate the symptoms and/or progression of the disorder. Such disorders may be evidenced, for example, by an increase in the concentration of the antigen in a biological fluid of a subject suffering from the disorder (e.g., an increase in the concentration of antigen in serum, plasma, synovial fluid, etc., of the subject). Non-limiting examples of disorders that can be treated with the binding proteins provided herein include those disorders discussed below and in the section pertaining to pharmaceutical compositions comprising the binding proteins.

[0134] DVD binding proteins are useful as therapeutic agents to simultaneously block two different targets to enhance efficacy/safety and/or increase patient coverage.

[0135] Additionally, DVD binding proteins provided herein can be employed for tissue-specific delivery (target a tissue marker and a disease mediator for enhanced local PK thus higher efficacy and/or lower toxicity), including intracellular delivery (targeting an internalizing receptor and an intracellular molecule), delivering to inside brain (targeting transferrin receptor and a CNS disease mediator for crossing the blood-brain barrier). DVD binding protein can also serve as a carrier protein to deliver an antigen to a specific location via binding to a non-neutralizing epitope of that antigen and also to increase the half-life of the antigen. Furthermore, DVD binding protein can be designed to either be physically linked to medical devices implanted into patients or target these medical devices (see Burke et al. (2006) Advanced Drug Deliv. Rev. 58(3): 437-446; Hildebrand et al. (2006) Surface and Coatings Technol. 200(22-23): 6318-6324; Drug/device combinations for local drug therapies and infection prophylaxis, Wu (2006) Biomaterials 27(11):2450-2467; Mediation of the cytokine network in the implantation of orthopedic devices, Marques (2005) Biodegradable Systems in Tissue Engineer. Regen. Med. 377-397). Briefly, directing appropriate types of cell to the site of medical implant may promote healing and restoring normal tissue function. Alternatively, inhibition of mediators (including but not limited to cytokines), released upon device implantation by a DVD coupled to or target to a device is also provided.

[0136] Binding protein molecules provided herein are useful as therapeutic molecules to treat various diseases, e.g., wherein the targets that are recognized by the binding proteins are detrimental. Such binding proteins may bind one or more targets involved in a specific disease. In an embodiment, the DVD-Igs of the invention are used to treat or diagnose human autoimmune or inflammatory disorders, asthma, rheumatoid arthritis, osteoarthritis, sepsis, systemic lupus erythematosis, multiple sclerosis, neurological disorders, or oncological disorders.

### III. Pharmaceutical Compositions

[0137] Pharmaceutical compositions comprising one or more binding proteins, either alone or in combination with prophylactic agents, therapeutic agents, and/or pharmaceutically acceptable carriers are provided. The pharmaceutical compositions comprising binding proteins provided herein are for use in, but not limited to, diagnosing, detecting, or monitoring a disorder, in preventing, treating, managing, or ameliorating a disorder or one or more symptoms thereof, and/or in research. The formulation of pharmaceutical compositions, either alone or in combination with prophylactic agents, therapeutic agents, and/or pharmaceutically acceptable carriers, are known to one skilled in the art (US Patent Publication No. 20090311253 A1).

[0138] Methods of administering a prophylactic or therapeutic agent provided herein include, but are not limited to, parenteral administration (e.g., intradermal, intramuscular, intraperitoneal, intravenous and subcutaneous), epidural administration, intratumoral administration, mucosal administration (e.g., intranasal and oral routes) and pulmonary administration (e.g., aerosolized compounds administered with an inhaler or nebulizer). The formulation of pharmaceutical compositions for specific routes of administration, and the materials and techniques necessary for the various methods of administration are available and known to one skilled in the art (US Patent Publication No. 20090311253 A1).

[0139] Dosage regimens may be adjusted to provide the optimum desired response (e.g., a therapeutic or prophylactic response). For example, a single bolus may be administered, several divided doses may be administered over time or the dose may be proportionally reduced or increased as indicated by the exigencies of the therapeutic situation. It is especially advantageous to formulate parenteral compositions in dosage unit form for ease of administration and uniformity of dosage. The term “dosage unit form” refers to physically discrete units suited as unitary dosages for the mammalian subjects to be treated; each unit containing a predetermined quantity of active compound calculated to produce the desired therapeutic effect in association with the required pharmaceutical carrier. The specification for the dosage unit forms provided herein are dictated by and directly dependent on (a) the unique characteristics of the active compound and the particular therapeutic or prophylactic effect to be achieved, and (b) the limitations inherent in the art of compounding such an active compound for the treatment of sensitivity in individuals.

[0140] An exemplary, non-limiting range for a therapeutically or prophylactically effective amount of a binding protein provided herein is 0.1-20 mg/kg, for example, 1-10 mg/kg. It is to be noted that dosage values may vary with the type and severity of the condition to be alleviated. It is to be further understood that for any particular subject, specific dosage regimens may be adjusted over time according to the individual need and the professional judgment of the person administering or supervising the administration of the compositions, and that dosage ranges set forth herein are exemplary only and are not intended to limit the scope or practice of the claimed composition.

### IV. Combination Therapy

[0141] A binding protein provided herein also can also be administered with one or more additional therapeutic agents useful in the treatment of various diseases, the additional agent being selected by the skilled artisan for its intended purpose. For example, the additional agent can be a therapeutic agent art-recognized as being useful to treat the disease or condition being treated by the antibody provided herein. The combination can also include more than one additional agent, e.g., two or three additional agents.

[0142] Combination therapy agents include, but are not limited to, antineoplastic agents, radiotherapy, chemotherapy such as DNA alkylating agents, cisplatin, carboplatin, anti-tubulin agents, paclitaxel, docetaxel, taxol, doxorubicin, gemcitabine, gemzar, anthracyclines, adriamycin, topoisomerase I inhibitors, topoisomerase II inhibitors, 5-fluorouracil (5-FU), leucovorin, irinotecan, receptor tyrosine kinase inhibitors (e.g., erlotinib, gefitinib), COX-2 inhibitors (e.g., celecoxib), kinase inhibitors, and siRNAs.

[0143] Combinations to treat autoimmune and inflammatory diseases are non-steroidal anti-inflammatory drug(s) also referred to as NSAIDS which include drugs like ibuprofen. Other combinations are corticosteroids including prednisolone; the well known side-effects of steroid use can be reduced or even eliminated by tapering the steroid dose required when treating patients in combination with the binding proteins provided herein. Non-limiting examples of therapeutic agents for rheumatoid arthritis with which an antibody provided herein, or antibody binding portion thereof, can be combined include the following: cytokine suppressive anti-inflammatory drug(s) (CSAIDs); antibodies to or antagonists of other human cytokines or growth factors, for example, TNF, LT, IL-1, IL-2, IL-3, IL-4, IL-5, IL-6, IL-7, IL-8, IL-15, IL-16, IL-18, IL-21, IL-23, interferons, EMAP-II, GM-CSF, FGF, and PDGF. Binding proteins provided herein, or antigen binding portions thereof, can be combined with antibodies to cell surface molecules such as CD2, CD3, CD4, CD8, CD25, CD28, CD30, CD40, CD45, CD69, CD80 (B7.1), CD86 (B7.2), CD90, CTLA or their ligands including CD154 (gp39 or CD40L).

[0144] Combinations of therapeutic agents may interfere at different points in the autoimmune and subsequent inflammatory cascade. Examples include a binding protein disclosed herein and a TNF antagonist like a chimeric, humanized or human TNF antibody, Adalimumab, (PCT Publication No. WO 97/29131), CA2 (Remicade™) CDP 571, a soluble p55 or p75 TNF receptor, or derivative thereof (p75TNFR1gG (Enbrel™) or p55TNFR1gG (Lenercept)), a TNFα converting enzyme (TACE) inhibitor; or an IL-1 inhibitor (an Interleukin-1-converting enzyme inhibitor, IL-1RA, etc.). Other combinations include a binding protein disclosed herein and Interleukin 11. Yet another combination include key players of the autoimmune response which may act parallel to, dependent on or in concert with IL-12 function; especially relevant are IL-18 antagonists including an IL-18 antibody, a soluble IL-18 receptor, or an IL-18 binding protein. It has been shown that IL-12 and IL-18 have overlapping but distinct functions and a combination of antagonists to both may be most effective. Yet another combination is a binding protein disclosed herein and a non-depleting anti-CD4 inhibitor. Yet other combinations include a binding protein disclosed herein and an antagonist of the co-stimulatory pathway CD80 (B7.1) or CD86 (B7.2) including an antibody, a soluble receptor, or an antagonistic ligand.

[0145] The binding proteins provided herein may also be combined with an agent, such as methotrexate, 6-MP, azathioprine sulphasalazine, mesalazine, olsalazine chloroquinine/hydroxychloroquine, pencillamine, aurothiomalate (intramuscular and oral), azathioprine, cochicine, a corticosteroid (oral, inhaled and local injection), a beta-2 adrenoreceptor agonist (salbutamol, terbutaline, salmeteral), a xanthine (theophylline, aminophylline), cromoglycate, nedocromil, ketotifen, ipratropium, oxitropium, cyclosporin, FK506, rapamycin, mycophenolate mofetil, leflunomide, an NSAID, for example, ibuprofen, a corticosteroid such as prednisolone, a phosphodiesterase inhibitor, an adensosine agonist, an antithrombotic agent, a complement inhibitor, an adrenergic agent, an agent which interferes with signalling by proinflammatory cytokines such as TNF-α or IL-1 (e.g., IRAK, NIK, IKK, p38 or a MAP kinase inhibitor), an IL-1β converting enzyme inhibitor, a TNFα converting enzyme (TACE) inhibitor, a T-cell signalling inhibitor such as a kinase inhibitor, a metalloproteinase inhibitor, sulfasalazine, azathioprine, a 6-mercaptopurine, an angiotensin converting enzyme inhibitor, a soluble cytokine receptor or derivative thereof (e.g., a soluble p55 or p75 TNF receptor or the derivative p75TNFRIgG (Enbrel™) or p55TNFRIgG (Lenercept), sIL-1RI, sIL-1RII, sIL-6R), an antiinflammatory cytokine (e.g., IL-4, IL-10, IL-11, IL-13 and TGFβ), celecoxib, folic acid, hydroxychloroquine sulfate, rofecoxib, etanercept, infliximab, naproxen, valdecoxib, sulfasalazine, methylprednisolone, meloxicam, methylprednisolone acetate, gold sodium thiomalate, aspirin, triamcinolone acetonide, propoxyphene napsylate/apap, folate, nabumetone, diclofenac, piroxicam, etodolac, diclofenac sodium, oxaprozin, oxycodone hcl, hydrocodone bitartrate/apap, diclofenac sodium/misoprostol, fentanyl, anakinra, human recombinant, tramadol hcl, salsalate, sulindac, cyanocobalamin/fa/pyridoxine, acetaminophen, alendronate sodium, prednisolone, morphine sulfate, lidocaine hydrochloride, indomethacin, glucosamine sulf/chondroitin, amitriptyline hcl, sulfadiazine, oxycodone hcl/acetaminophen, olopatadine hcl, misoprostol, naproxen sodium, omeprazole, cyclophosphamide, rituximab, IL-1 TRAP, MRA, CTLA4-IG, IL-18 BP, anti-IL-18, Anti-IL15, BIRB-796, SC10-469, VX-702, AMG-548, VX-740, Roflumilast, IC-485, CDC-801, or Mesopram. Combinations include methotrexate or leflunomide and in moderate or severe rheumatoid arthritis cases, cyclosporine.

[0146] In one embodiment, the binding protein or antigen-binding portion thereof, is administered in combination with one of the following agents for the treatment of rheumatoid arthritis: a small molecule inhibitor of KDR, a small molecule inhibitor of Tie-2; methotrexate; prednisone; celecoxib; folic acid; hydroxychloroquine sulfate; rofecoxib; etanercept; infliximab; leflunomide; naproxen; valdecoxib; sulfasalazine; methylprednisolone; ibuprofen; meloxicam; methylprednisolone acetate; gold sodium thiomalate; aspirin; azathioprine; triamcinolone acetonide; propxyphene napsylate/apap; folate; nabumetone; diclofenac; piroxicam; etodolac; diclofenac sodium; oxaprozin; oxycodone hcl; hydrocodone bitartrate/apap; diclofenac sodium/misoprostol; fentanyl; anakinra, human recombinant; tramadol hcl; salsalate; sulindac; cyanocobalamin/fa/pyridoxine; acetaminophen; alendronate sodium; prednisolone; morphine sulfate; lidocaine hydrochloride; indomethacin; glucosamine sulfate/chondroitin; cyclosporine; amitriptyline hcl; sulfadiazine; oxycodone hcl/acetaminophen; olopatadine hcl; misoprostol; naproxen sodium; omeprazole; mycophenolate mofetil; cyclophosphamide; rituximab; IL-1 TRAP; MRA; CTLA4-IG; IL-18 BP; IL-12/23; anti-IL 18; anti-IL 15; BIRB-796; SC10-469; VX-702; AMG-548; VX-740; Roflumilast; IC-485; CDC-801; or mesopram.

[0147] Non-limiting examples of therapeutic agents for inflammatory bowel disease with which a binding protein provided herein can be combined include the following: budenoside; epidermal growth factor; a corticosteroid; cyclosporin, sulfasalazine; aminosalicylates; 6-mercaptopurine; azathioprine; metronidazole; a lipoxygenase inhibitor; mesalamine; olsalazine; balsalazide; an antioxidant; a thromboxane inhibitor; an IL-1 receptor antagonist; an anti-IL-1β mAb; an anti-IL-6 mAb; a growth factor; an elastase inhibitor; a pyridinyl-imidazole compound; an antibody to or antagonist of other human cytokines or growth factors, for example, TNF, LT, IL-1, IL-2, IL-6, IL-7, IL-8, IL-15, IL-16, IL-17, IL-18, EMAP-II, GM-CSF, FGF, or PDGF. Antibodies provided herein, or antigen binding portions thereof, can be combined with an antibody to a cell surface molecule such as CD2, CD3, CD4, CD8, CD25, CD28, CD30, CD40, CD45, CD69, CD90 or their ligands. The antibodies provided herein, or antigen binding portions thereof, may also be combined with an agent, such as methotrexate, cyclosporin, FK506, rapamycin, mycophenolate mofetil, leflunomide, an NSAID, for example, ibuprofen, a corticosteroid such as prednisolone, a phosphodiesterase inhibitor, an adenosine agonist, an antithrombotic agent, a complement inhibitor, an adrenergic agent, an agent which interferes with signalling by proinflammatory cytokines such as TNFα or IL-1 (e.g., an IRAK, NIK, IKK, p38 or MAP kinase inhibitor), an IL-1β converting enzyme inhibitor, a TNFα converting enzyme inhibitor, a T-cell signalling inhibitor such as a kinase inhibitor, a metalloproteinase inhibitor, sulfasalazine, azathioprine, a 6-mercaptopurine, an angiotensin converting enzyme inhibitor, a soluble cytokine receptor or derivative thereof (e.g., a soluble p55 or p75 TNF receptor, sIL-1RI, sIL-1RII, sIL-6R) or an antiinflammatory cytokine (e.g., IL-4, IL-10, IL-11, IL-13 or TGFβ) or a bcl-2 inhibitor.

[0148] Examples of therapeutic agents for Crohn's disease in which a binding protein can be combined include the following: a TNF antagonist, for example, an anti-TNF antibody, Adalimumab (PCT Publication No. WO 97/29131; HUMIRA), CA2 (REMICADE), CDP 571, a TNFR-Ig construct, (p75TNFRIgG (ENBREL) or a p55TNFRIgG (LENERCEPT)) inhibitor or a PDE4 inhibitor. Antibodies provided herein, or antigen binding portions thereof, can be combined with a corticosteroid, for example, budenoside and dexamethasone. Binding proteins provided herein or antigen binding portions thereof, may also be combined with an agent such as sulfasalazine, 5-aminosalicylic acid and olsalazine, or an agent that interferes with the synthesis or action of a proinflammatory cytokine such as IL-1, for example, an IL-1β converting enzyme inhibitor or IL-1ra. Antibodies provided herein or antigen binding portion thereof may also be used with a T cell signaling inhibitor, for example, a tyrosine kinase inhibitor or an 6-mercaptopurine. Binding proteins provided herein, or antigen binding portions thereof, can be combined with IL-11. Binding proteins provided herein, or antigen binding portions thereof, can be combined with mesalamine, prednisone, azathioprine, mercaptopurine, infliximab, methylprednisolone sodium succinate, diphenoxylate/atrop sulfate, loperamide hydrochloride, methotrexate, omeprazole, folate, ciprofloxacin/dextrose-water, hydrocodone bitartrate/apap, tetracycline hydrochloride, fluocinonide, metronidazole, thimerosal/boric acid, cholestyramine/sucrose, ciprofloxacin hydrochloride, hyoscyamine sulfate, meperidine hydrochloride, midazolam hydrochloride, oxycodone hcl/acetaminophen, promethazine hydrochloride, sodium phosphate, sulfamethoxazole/trimethoprim, celecoxib, polycarbophil, propoxyphene napsylate, hydrocortisone, multivitamins, balsalazide disodium, codeine phosphate/apap, colesevelam hcl, cyanocobalamin, folic acid, levofloxacin, methylprednisolone, natalizumab or interferon-gamma

[0149] Non-limiting examples of therapeutic agents for multiple sclerosis with which binding proteins provided herein can be combined include the following: a corticosteroid; prednisolone; methylprednisolone; azathioprine; cyclophosphamide; cyclosporine; methotrexate; 4-aminopyridine; tizanidine; interferon-β1a (AVONEX; Biogen); interferon-β1b (BETASERON; Chiron/Berlex); interferon α-n3) (Interferon Sciences/Fujimoto), interferon-α (Alfa Wassermann/J&J), interferon β1A-IF (Serono/Inhale Therapeutics), Peginterferon α 2b (Enzon/Schering-Plough), Copolymer 1 (Cop-1; COPAXONE; Teva Pharmaceutical Industries, Inc.); hyperbaric oxygen; intravenous immunoglobulin; clabribine; an antibody to or antagonist of other human cytokines or growth factors and their receptors, for example, TNF, LT, IL-1, IL-2, IL-6, IL-7, IL-8, IL-23, IL-15, IL-16, IL-18, EMAP-II, GM-CSF, FGF, or PDGF. Binding proteins provided herein can be combined with an antibody to a cell surface molecule such as CD2, CD3, CD4, CD8, CD19, CD20, CD25, CD28, CD30, CD40, CD45, CD69, CD80, CD86, CD90 or their ligands. Binding proteins provided herein, may also be combined with an agent, such as methotrexate, cyclosporine, FK506, rapamycin, mycophenolate mofetil, leflunomide, an NSAID, for example, ibuprofen, a corticosteroid such as prednisolone, a phosphodiesterase inhibitor, an adensosine agonist, an antithrombotic agent, a complement inhibitor, an adrenergic agent, an agent which interferes with signalling by a proinflammatory cytokine such as TNFα or IL-1 (e.g., IRAK, NIK, IKK, p38 or a MAP kinase inhibitor), an IL-1β converting enzyme inhibitor, a TACE inhibitor, a T-cell signaling inhibitor such as a kinase inhibitor, a metalloproteinase inhibitor, sulfasalazine, azathioprine, a 6-mercaptopurine, an angiotensin converting enzyme inhibitor, a soluble cytokine receptor or derivatives thereof (e.g., a soluble p55 or p75 TNF receptor, sIL-1RI, sIL-1RII, sIL-6R), an antiinflammatory cytokine (e.g., IL-4, IL-10, IL-13 or TGFβ) or a bcl-2 inhibitor.

[0150] Examples of therapeutic agents for multiple sclerosis in which binding proteins provided herein can be combined include interferon-β, for example, IFNβ1a and IFNβ1b; copaxone, corticosteroids, caspase inhibitors, for example inhibitors of caspase-1, IL-1 inhibitors, TNF inhibitors, and antibodies to CD40 ligand and CD80.

[0151] Non-limiting examples of therapeutic agents for asthma with which binding proteins provided herein can be combined include the following: albuterol, salmeterol/fluticasone, montelukast sodium, fluticasone propionate, budesonide, prednisone, salmeterol xinafoate, levalbuterol hcl, albuterol sulfate/ipratropium, prednisolone sodium phosphate, triamcinolone acetonide, beclomethasone dipropionate, ipratropium bromide, azithromycin, pirbuterol acetate, prednisolone, theophylline anhydrous, methylprednisolone sodium succinate, clarithromycin, zafirlukast, formoterol fumarate, influenza virus vaccine, methylprednisolone, amoxicillin trihydrate, flunisolide, allergy injection, cromolyn sodium, fexofenadine hydrochloride, flunisolide/menthol, amoxicillin/clavulanate, levofloxacin, inhaler assist device, guaifenesin, dexamethasone sodium phosphate, moxifloxacin hcl, doxycycline hyclate, guaifenesin/d-methorphan, p-ephedrine/cod/chlorphenir, gatifloxacin, cetirizine hydrochloride, mometasone furoate, salmeterol xinafoate, benzonatate, cephalexin, pe/hydrocodone/chlorphenir, cetirizine hcl/pseudoephed, phenylephrine/cod/promethazine, codeine/promethazine, cefprozil, dexamethasone, guaifenesin/pseudoephedrine, chlorpheniramine/hydrocodone, nedocromil sodium, terbutaline sulfate, epinephrine, methylprednisolone, metaproterenol sulfate.

[0152] Non-limiting examples of therapeutic agents for COPD with which binding proteins provided herein can be combined include the following: albuterol sulfate/ipratropium, ipratropium bromide, salmeterol/fluticasone, albuterol, salmeterol xinafoate, fluticasone propionate, prednisone, theophylline anhydrous, methylprednisolone sodium succinate, montelukast sodium, budesonide, formoterol fumarate, triamcinolone acetonide, levofloxacin, guaifenesin, azithromycin, beclomethasone dipropionate, levalbuterol hcl, flunisolide, ceftriaxone sodium, amoxicillin trihydrate, gatifloxacin, zafirlukast, amoxicillin/clavulanate, flunisolide/menthol, chlorpheniramine/hydrocodone, metaproterenol sulfate, methylprednisolone, mometasone furoate, p-ephedrine/cod/chlorphenir, pirbuterol acetate, p-ephedrine/loratadine, terbutaline sulfate, tiotropium bromide, (R,R)-formoterol, TgAAT, Cilomilast, Roflumilast.

[0153] Non-limiting examples of therapeutic agents for psoriasis with which binding proteins provided herein can be combined include the following: small molecule inhibitor of KDR, small molecule inhibitor of Tie-2, calcipotriene, clobetasol propionate, triamcinolone acetonide, halobetasol propionate, tazarotene, methotrexate, fluocinonide, betamethasone diprop augmented, fluocinolone acetonide, acitretin, tar shampoo, betamethasone valerate, mometasone furoate, ketoconazole, pramoxine/fluocinolone, hydrocortisone valerate, flurandrenolide, urea, betamethasone, clobetasol propionate/emoll, fluticasone propionate, azithromycin, hydrocortisone, moisturizing formula, folic acid, desonide, pimecrolimus, coal tar, diflorasone diacetate, etanercept folate, lactic acid, methoxsalen, he/bismuth subgal/znox/resor, methylprednisolone acetate, prednisone, sunscreen, halcinonide, salicylic acid, anthralin, clocortolone pivalate, coal extract, coal tar/salicylic acid, coal tar/salicylic acid/sulfur, desoximetasone, diazepam, emollient, fluocinonide/emollient, mineral oil/castor oil/na lact, mineral oil/peanut oil, petroleum/isopropyl myristate, psoralen, salicylic acid, soap/tribromsalan, thimerosal/boric acid, celecoxib, infliximab, cyclosporine, alefacept, efalizumab, tacrolimus, pimecrolimus, PUVA, UVB, sulfasalazine.

[0154] Examples of therapeutic agents for SLE (Lupus) in which binding proteins provided herein can be combined include the following: NSAIDS, for example, diclofenac, naproxen, ibuprofen, piroxicam, indomethacin; COX2 inhibitors, for example, Celecoxib, rofecoxib, valdecoxib; anti-malarials, for example, hydroxychloroquine; Steroids, for example, prednisone, prednisolone, budenoside, dexamethasone; Cytotoxics, for example, azathioprine, cyclophosphamide, mycophenolate mofetil, methotrexate; inhibitors of PDE4 or purine synthesis inhibitor, for example Cellcept. Binding proteins provided herein may also be combined with agents such as sulfasalazine, 5-aminosalicylic acid, olsalazine, Imuran and agents which interfere with synthesis, production or action of proinflammatory cytokines such as IL-1, for example, caspase inhibitors like IL-1β converting enzyme inhibitors and IL-1ra. Binding proteins provided herein may also be used with T cell signaling inhibitors, for example, tyrosine kinase inhibitors; or molecules that target T cell activation molecules, for example, CTLA-4-IgG or anti-B7 family antibodies, anti-PD-1 family antibodies. Binding proteins provided herein, can be combined with IL-11 or anti-cytokine antibodies, for example, fonotolizumab (anti-IFNg antibody), or anti-receptor receptor antibodies, for example, anti-IL-6 receptor antibody and antibodies to B-cell surface molecules. Antibodies provided herein or antigen binding portion thereof may also be used with LJP 394 (abetimus), agents that deplete or inactivate B-cells, for example, Rituximab (anti-CD20 antibody), lymphostat-B (anti-BlyS antibody), TNF antagonists, for example, anti-TNF antibodies, Adalimumab (PCT Publication No. WO 97/29131; HUMIRA), CA2 (REMICADE), CDP 571, TNFR-Ig constructs, (p75TNFRIgG (ENBREL) and p55TNFRIgG (LENERCEPT)) and bcl-2 inhibitors, because bcl-2 overexpression in transgenic mice has been demonstrated to cause a lupus like phenotype (see Marquina The pharmaceutical compositions provided herein may include a “therapeutically effective amount” or a “prophylactically effective amount” of a binding protein provided herein. A “therapeutically effective amount” refers to an amount effective, at dosages and for periods of time necessary, to achieve the desired therapeutic result. A therapeutically effective amount of the binding protein may be determined by a person skilled in the art and may vary according to factors such as the disease state, age, sex, and weight of the individual, and the ability of the binding protein to elicit a desired response in the individual. A therapeutically effective amount is also one in which any toxic or detrimental effects of the antibody, or antibody binding portion, are outweighed by the therapeutically beneficial effects. A “prophylactically effective amount” refers to an amount effective, at dosages and for periods of time necessary, to achieve the desired prophylactic result. Typically, since a prophylactic dose is used in subjects prior to or at an earlier stage of disease, the prophylactically effective amount will be less than the therapeutically effective amount.

### V. Diagnostics

[0155] The disclosure herein also provides diagnostic applications including, but not limited to, diagnostic assay methods, diagnostic kits containing one or more binding proteins, and adaptation of the methods and kits for use in automated and/or semi-automated systems. The methods, kits, and adaptations provided may be employed in the detection, monitoring, and/or treatment of a disease or disorder in an individual. This is further elucidated below.

[0156] A. Method of Assay

[0157] The present disclosure also provides a method for determining the presence, amount or concentration of an analyte, or fragment thereof, in a test sample using at least one binding protein as described herein. Any suitable assay as is known in the art can be used in the method. Examples include, but are not limited to, immunoassays and/or methods employing mass spectrometry.

[0158] Immunoassays provided by the present disclosure may include sandwich immunoassays, radioimmunoassay (RIA), enzyme immunoassay (EIA), enzyme-linked immunosorbent assay (ELISA), competitive-inhibition immunoassays, fluorescence polarization immunoassay (FPIA), enzyme multiplied immunoassay technique (EMIT), bioluminescence resonance energy transfer (BRET), and homogenous chemiluminescent assays, among others.

[0159] A chemiluminescent microparticle immunoassay, in particular one employing the ARCHITECT® automated analyzer (Abbott Laboratories, Abbott Park, Ill.), is an example of an immunoassay.

[0160] Methods employing mass spectrometry are provided by the present disclosure and include, but are not limited to MALDI (matrix-assisted laser desorption/ionization) or by SELDI (surface-enhanced laser desorption/ionization).

[0161] Methods for collecting, handling, processing, and analyzing biological test samples using immunoassays and mass spectrometry would be well-known to one skilled in the art, are provided for in the practice of the present disclosure (US 2009-0311253 A1).

[0162] B. Kit

[0163] A kit for assaying a test sample for the presence, amount or concentration of an analyte, or fragment thereof, in a test sample is also provided. The kit comprises at least one component for assaying the test sample for the analyte, or fragment thereof, and instructions for assaying the test sample for the analyte, or fragment thereof. The at least one component for assaying the test sample for the analyte, or fragment thereof, can include a composition comprising a binding protein, as disclosed herein, and/or an anti-analyte binding protein (or a fragment, a variant, or a fragment of a variant thereof), which is optionally immobilized on a solid phase.

[0164] Optionally, the kit may comprise a calibrator or control, which may comprise isolated or purified analyte. The kit can comprise at least one component for assaying the test sample for an analyte by immunoassay and/or mass spectrometry. The kit components, including the analyte, binding protein, and/or anti-analyte binding protein, or fragments thereof, may be optionally labeled using any art-known detectable label. The materials and methods for the creation provided for in the practice of the present disclosure would be known to one skilled in the art (US 2009-0311253 A1).

[0165] C. Adaptation of Kit and Method

[0166] The kit (or components thereof), as well as the method of determining the presence, amount or concentration of an analyte in a test sample by an assay, such as an immunoassay as described herein, can be adapted for use in a variety of automated and semi-automated systems (including those wherein the solid phase comprises a microparticle), as described, for example, in U.S. Pat. Nos. 5,089,424 and 5,006,309, and as commercially marketed, for example, by Abbott Laboratories (Abbott Park, Ill.) as ARCHITECT®.

[0167] Other platforms available from Abbott Laboratories include, but are not limited to, AxSYM®, IMx® (see, for example, U.S. Pat. No. 5,294,404, PRISM®, EIA (bead), and Quantum™ II, as well as other platforms. Additionally, the assays, kits and kit components can be employed in other formats, for example, on electrochemical or other hand-held or point-of-care assay systems. The present disclosure is, for example, applicable to the commercial Abbott Point of Care (i-STAT®, Abbott Laboratories) electrochemical immunoassay system that performs sandwich immunoassays. Immunosensors and their methods of manufacture and operation in single-use test devices are described, for example in, U.S. Pat. Nos. 5,063,081, 7,419,821, and 7,682,833; and US Publication Nos. 20040018577, 20060160164 and US 20090311253.

[0168] It will be readily apparent to those skilled in the art that other suitable modifications and adaptations of the methods described herein are obvious and may be made using suitable equivalents without departing from the scope of the embodiments disclosed herein. Having now described certain embodiments in detail, the same will be more clearly understood by reference to the following examples, which are included for purposes of illustration only and are not intended to be limiting.

### EXAMPLES

### Example 1

### Generation and Characterization of Dual Variable Domain (DVD) Binding Proteins

[0169] Two and four-chain dual variable domain (DVD) binding proteins, e.g., DVD-Ig™, using parent antibodies were generated by synthesizing polynucleotide fragments encoding DVD binding protein variable heavy and DVD binding protein variable light chain sequences and cloning the fragments into a pHybC-D2 vector according to art known methods. The DVD binding protein constructs were cloned into and expressed in 293 cells and purified according to art known methods. DVD VH and VL chains for the DVD binding proteins are provided below. The SEQ ID NOs listed in the leftmost column of Tables 2-4 refer to the sequences for the full variable domain of the DVD binding protein identified in that row of the Table. Each row in the rightmost column of Tables 2-4 provides three SEQ ID NOs. The first number refers to the SEQ ID NO of the outer variable domain sequence, the second number refers to the SEQ ID NO of the linker, and the third number refers to the SEQ ID NO of the inner variable domain sequence, that together are found within the full DVD variable domain sequence (i.e., the full DVD variable domain comprising VD1-X1-VD2).

TABLE 2
DVD Binding Proteins That Bind TNF and IL-13

| | | Outer | | Inner | |
|---|---|---|---|---|---|
| | DVD-Ig | Variable | | Variable | SEQ ID NO |
| | Variable | Domain | | Domain | VD1 - |
| SEQ ID | Domain | Name | | Name | X1 - VD2 |
| NO | Name | (VD1) | Linker | (VD2) | Formula |
| 120 | DVD2683H | AB436VH | GS-H10 | AB397VH | 38-29-32 |
| 121 | DVD2683L | AB436VL | GS-L10 | AB397VL | 39-30-33 |
| 122 | DVD2684H | AB436VH | HG-short | AB397VH | 38-21-32 |
| 123 | DVD2684L | AB436VL | LK-short | AB397VL | 39-13-33 |
| 124 | DVD2686H | AB436VH | HG-short | AB397VH | 38-21-32 |
| 125 | DVD2686L | AB436VL | LK-long | AB397VL | 39-14-33 |
| 126 | DVD2687H | AB436VH | HG-long | AB397VH | 38-22-32 |
| 127 | DVD2687L | AB436VL | LK-short | AB397VL | 39-13-33 |
| 128 | DVD2688H | AB397VH | GS-H10 | AB436VH | 32-29-38 |
| 129 | DVD2688L | AB397VL | GS-L10 | AB436VL | 33-30-39 |
| 130 | DVD2689H | AB397VH | HG-short | AB436VH | 32-21-38 |
| 131 | DVD2689L | AB397VL | LK-short | AB436VL | 33-13-39 |
| 132 | DVD2691H | AB397VH | HG-short | AB436VH | 32-21-38 |
| 133 | DVD2691L | AB397VL | LK-long | AB436VL | 33-14-39 |
| 134 | DVD2692H | AB397VH | HG-long | AB436VH | 32-22-38 |
| 135 | DVD2692L | AB397VL | LK-short | AB436VL | 33-13-39 |
| 136 | DVD2733H | AB437VH | GS-H10 | AB397VH | 40-29-32 |
| 137 | DVD2733L | AB437VL | GS-L10 | AB397VL | 41-30-33 |
| 138 | DVD2734H | AB437VH | HG-short | AB397VH | 40-21-32 |
| 139 | DVD2734L | AB437VL | LK-short | AB397VL | 41-13-33 |
| 140 | DVD2736H | AB437VH | HG-short | AB397VH | 40-21-32 |
| 141 | DVD2736L | AB437VL | LK-long | AB397VL | 41-14-33 |
| 142 | DVD2737H | AB437VH | HG-long | AB397VH | 40-22-32 |
| 143 | DVD2737L | AB437VL | LK-short | AB397VL | 41-13-33 |
| 144 | DVD2738H | AB397VH | GS-H10 | AB437VH | 32-29-40 |
| 145 | DVD2738L | AB397VL | GS-L10 | AB437VL | 33-30-41 |
| 146 | DVD2739H | AB397VH | HG-short | AB437VH | 32-21-40 |
| 147 | DVD2739L | AB397VL | LK-short | AB437VL | 33-13-41 |
| 148 | DVD2741H | AB397VH | HG-short | AB437VH | 32-21-40 |
| 149 | DVD2741L | AB397VL | LK-long | AB437VL | 33-14-41 |
| 150 | DVD2742H | AB397VH | HG-long | AB437VH | 32-22-40 |
| 151 | DVD2742L | AB397VL | LK-short | AB437VL | 33-13-41 |
| 152 | DVD2783H | AB441VH | GS-H10 | AB397VH | 42-29-32 |
| 153 | DVD2783L | AB441VL | GS-L10 | AB397VL | 43-30-33 |
| 154 | DVD2784H | AB441VH | HG-short | AB397VH | 42-21-32 |
| 155 | DVD2784L | AB441VL | LK-short | AB397VL | 43-13-33 |
| 156 | DVD2786H | AB441VH | HG-short | AB397VH | 42-21-32 |
| 157 | DVD2786L | AB441VL | LK-long | AB397VL | 43-14-33 |
| 158 | DVD2787H | AB441VH | HG-long | AB397VH | 42-22-32 |
| 159 | DVD2787L | AB441VL | LK-short | AB397VL | 43-13-33 |
| 160 | DVD2788H | AB397VH | GS-H10 | AB441VH | 32-29-42 |
| 161 | DVD2788L | AB397VL | GS-L10 | AB441VL | 33-30-43 |
| 162 | DVD2789H | AB397VH | HG-short | AB441VH | 32-21-42 |
| 163 | DVD2789L | AB397VL | LK-short | AB441VL | 33-13-43 |
| 164 | DVD2791H | AB397VH | HG-short | AB441VH | 32-21-42 |
| 165 | DVD2791L | AB397VL | LK-long | AB441VL | 33-14-43 |
| 166 | DVD2792H | AB397VH | HG-long | AB441VH | 32-22-42 |
| 167 | DVD2792L | AB397VL | LK-short | AB441VL | 33-13-43 |
| 168 | DVD3008H | AB444VH | GS-H10 | AB397VH | 48-29-32 |
| 169 | DVD3008L | AB444VL | GS-L10 | AB397VL | 49-30-33 |
| 170 | DVD3009H | AB444VH | HG-short | AB397VH | 48-21-32 |
| 171 | DVD3009L | AB444VL | LK-short | AB397VL | 49-13-33 |
| 172 | DVD3011H | AB444VH | HG-short | AB397VH | 48-21-32 |
| 173 | DVD3011L | AB444VL | LK-long | AB397VL | 49-14-33 |
| 174 | DVD3012H | AB444VH | HG-long | AB397VH | 48-22-32 |
| 175 | DVD3012L | AB444VL | LK-short | AB397VL | 49-13-33 |
| 176 | DVD3013H | AB397VH | GS-H10 | AB444VH | 32-29-48 |
| 177 | DVD3013L | AB397VL | GS-L10 | AB444VL | 33-30-49 |
| 178 | DVD3014H | AB397VH | HG-short | AB444VH | 32-21-48 |
| 179 | DVD3014L | AB397VL | LK-short | AB444VL | 33-13-49 |
| 180 | DVD3016H | AB397VH | HG-short | AB444VH | 32-21-48 |
| 181 | DVD3016L | AB397VL | LK-long | AB444VL | 33-14-49 |
| 182 | DVD3017H | AB397VH | HG-long | AB444VH | 32-22-48 |
| 183 | DVD3017L | AB397VL | LK-short | AB444VL | 33-13-49 |
| 184 | DVD3083H | AB436VH | GS-H10 | AB398VH | 38-29-34 |
| 185 | DVD3083L | AB436VL | GS-L10 | AB398VL | 39-30-35 |
| 186 | DVD3084H | AB436VH | HG-short | AB398VH | 38-21-34 |
| 187 | DVD3084L | AB436VL | LK-short | AB398VL | 39-13-35 |
| 188 | DVD3086H | AB436VH | HG-short | AB398VH | 38-21-34 |
| 189 | DVD3086L | AB436VL | LK-long | AB398VL | 39-14-35 |
| 190 | DVD3087H | AB436VH | HG-long | AB398VH | 38-22-34 |
| 191 | DVD3087L | AB436VL | LK-short | AB398VL | 39-13-35 |
| 192 | DVD3088H | AB398VH | GS-H10 | AB436VH | 34-29-38 |
| 193 | DVD3088L | AB398VL | GS-L10 | AB436VL | 35-30-39 |
| 194 | DVD3089H | AB398VH | HG-short | AB436VH | 34-21-38 |
| 195 | DVD3089L | AB398VL | LK-short | AB436VL | 35-13-39 |
| 196 | DVD3091H | AB398VH | HG-short | AB436VH | 34-21-38 |
| 197 | DVD3091L | AB398VL | LK-long | AB436VL | 35-14-39 |
| 198 | DVD3092H | AB398VH | HG-long | AB436VH | 34-22-38 |
| 199 | DVD3092L | AB398VL | LK-short | AB436VL | 35-13-39 |
| 200 | DVD3093H | AB437VH | GS-H10 | AB398VH | 40-29-38 |
| 201 | DVD3093L | AB437VL | GS-L10 | AB398VL | 41-30-39 |
| 202 | DVD3094H | AB437VH | HG-short | AB398VH | 40-21-38 |
| 203 | DVD3094L | AB437VL | LK-short | AB398VL | 41-13-39 |
| 204 | DVD3096H | AB437VH | HG-short | AB398VH | 40-21-38 |
| 205 | DVD3096L | AB437VL | LK-long | AB398VL | 41-14-39 |
| 206 | DVD3097H | AB437VH | HG-long | AB398VH | 40-22-38 |
| 207 | DVD3097L | AB437VL | LK-short | AB398VL | 41-13-39 |
| 208 | DVD3098H | AB398VH | GS-H10 | AB437VH | 34-29-40 |
| 209 | DVD3098L | AB398VL | GS-L10 | AB437VL | 35-30-41 |
| 210 | DVD3099H | AB398VH | HG-short | AB437VH | 34-21-40 |
| 211 | DVD3099L | AB398VL | LK-short | AB437VL | 35-13-41 |
| 212 | DVD3101H | AB398VH | HG-short | AB437VH | 34-21-40 |
| 213 | DVD3101L | AB398VL | LK-long | AB437VL | 35-14-41 |
| 214 | DVD3102H | AB398VH | HG-long | AB437VH | 34-22-40 |
| 215 | DVD3102L | AB398VL | LK-short | AB437VL | 35-13-41 |
| 216 | DVD3103H | AB441VH | GS-H10 | AB398VH | 42-29-38 |
| 217 | DVD3103L | AB441VL | GS-L10 | AB398VL | 43-30-39 |
| 218 | DVD3104H | AB441VH | HG-short | AB398VH | 42-21-38 |
| 219 | DVD3104L | AB441VL | LK-short | AB398VL | 43-13-39 |
| 220 | DVD3106H | AB441VH | HG-short | AB398VH | 42-21-38 |
| 221 | DVD3106L | AB441VL | LK-long | AB398VL | 43-14-39 |
| 222 | DVD3107H | AB441VH | HG-long | AB398VH | 42-22-38 |
| 223 | DVD3107L | AB441VL | LK-short | AB398VL | 43-13-39 |
| 224 | DVD3108H | AB398VH | GS-H10 | AB441VH | 34-29-42 |
| 225 | DVD3108L | AB398VL | GS-L10 | AB441VL | 35-30-43 |
| 226 | DVD3109H | AB398VH | HG-short | AB441VH | 34-21-42 |
| 227 | DVD3109L | AB398VL | LK-short | AB441VL | 35-13-43 |
| 228 | DVD3111H | AB398VH | HG-short | AB441VH | 34-21-42 |
| 229 | DVD3111L | AB398VL | LK-long | AB441VL | 35-14-43 |
| 230 | DVD3112H | AB398VH | HG-long | AB441VH | 34-22-42 |
| 231 | DVD3112L | AB398VL | LK-short | AB441VL | 35-13-43 |
| 232 | DVD3113H | AB444VH | GS-H10 | AB398VH | 48-29-38 |
| 233 | DVD3113L | AB444VL | GS-L10 | AB398VL | 49-30-39 |
| 234 | DVD3114H | AB444VH | HG-short | AB398VH | 48-21-38 |
| 235 | DVD3114L | AB444VL | LK-short | AB398VL | 49-13-39 |
| 236 | DVD3116H | AB444VH | HG-short | AB398VH | 48-21-38 |
| 237 | DVD3116L | AB444VL | LK-long | AB398VL | 49-14-39 |
| 238 | DVD3117H | AB444VH | HG-long | AB398VH | 48-22-38 |
| 239 | DVD3117L | AB444VL | LK-short | AB398VL | 49-13-39 |
| 240 | DVD3118H | AB398VH | GS-H10 | AB444VH | 34-29-48 |
| 241 | DVD3118L | AB398VL | GS-L10 | AB444VL | 35-30-49 |
| 242 | DVD3119H | AB398VH | HG-short | AB444VH | 34-21-48 |
| 243 | DVD3119L | AB398VL | LK-short | AB444VL | 35-13-49 |
| 244 | DVD3121H | AB398VH | HG-short | AB444VH | 34-21-48 |
| 245 | DVD3121L | AB398VL | LK-long | AB444VL | 35-14-49 |
| 246 | DVD3122H | AB398VH | HG-long | AB444VH | 34-22-48 |
| 247 | DVD3122L | AB398VL | LK-short | AB444VL | 35-13-49 |
| 248 | DVD3143H | AB436VH | GS-H10 | AB399VH | 38-29-36 |
| 249 | DVD3143L | AB436VL | GS-L10 | AB399VL | 39-30-37 |
| 250 | DVD3144H | AB436VH | HG-short | AB399VH | 38-21-36 |
| 251 | DVD3144L | AB436VL | LK-short | AB399VL | 39-13-37 |
| 252 | DVD3146H | AB436VH | HG-short | AB399VH | 38-21-36 |
| 253 | DVD3146L | AB436VL | LK-long | AB399VL | 39-14-37 |
| 254 | DVD3147H | AB436VH | HG-long | AB399VH | 38-22-36 |
| 255 | DVD3147L | AB436VL | LK-short | AB399VL | 39-13-37 |
| 256 | DVD3153H | AB437VH | GS-H10 | AB399VH | 40-29-36 |
| 257 | DVD3153L | AB437VL | GS-L10 | AB399VL | 41-30-37 |
| 258 | DVD3154H | AB437VH | HG-short | AB399VH | 40-21-36 |
| 259 | DVD3154L | AB437VL | LK-short | AB399VL | 41-13-37 |
| 260 | DVD3156H | AB437VH | HG-short | AB399VH | 40-21-36 |
| 261 | DVD3156L | AB437VL | LK-long | AB399VL | 41-14-37 |
| 262 | DVD3157H | AB437VH | HG-long | AB399VH | 40-22-36 |
| 263 | DVD3157L | AB437VL | LK-short | AB399VL | 41-13-37 |
| 264 | DVD3158H | AB399VH | GS-H10 | AB437VH | 36-29-40 |
| 265 | DVD3158L | AB399VL | GS-L10 | AB437VL | 37-30-41 |
| 266 | DVD3159H | AB399VH | HG-short | AB437VH | 36-21-40 |
| 267 | DVD3159L | AB399VL | LK-short | AB437VL | 37-13-41 |
| 268 | DVD3163H | AB441VH | GS-H10 | AB399VH | 42-29-36 |
| 269 | DVD3163L | AB441VL | GS-L10 | AB399VL | 43-30-37 |
| 270 | DVD3164H | AB441VH | HG-short | AB399VH | 42-21-36 |
| 271 | DVD3164L | AB441VL | LK-short | AB399VL | 43-13-37 |
| 272 | DVD3166H | AB441VH | HG-short | AB399VH | 42-21-36 |
| 273 | DVD3166L | AB441VL | LK-long | AB399VL | 43-14-37 |
| 274 | DVD3167H | AB441VH | HG-long | AB399VH | 42-22-36 |
| 275 | DVD3167L | AB441VL | LK-short | AB399VL | 43-13-37 |
| 276 | DVD3168H | AB399VH | GS-H10 | AB441VH | 36-29-42 |
| 277 | DVD3168L | AB399VL | GS-L10 | AB441VL | 37-30-43 |
| 278 | DVD3169H | AB399VH | HG-short | AB441VH | 36-21-42 |
| 279 | DVD3169L | AB399VL | LK-short | AB441VL | 37-13-43 |
| 280 | DVD3173H | AB444VH | GS-H10 | AB399VH | 48-29-63 |
| 281 | DVD3173L | AB444VL | GS-L10 | AB399VL | 49-30-37 |
| 282 | DVD3174H | AB444VH | HG-short | AB399VH | 48-21-36 |
| 283 | DVD3174L | AB444VL | LK-short | AB399VL | 49-13-37 |
| 284 | DVD3176H | AB444VH | HG-short | AB399VH | 48-21-36 |
| 285 | DVD3176L | AB444VL | LK-long | AB399VL | 49-14-37 |
| 286 | DVD3177H | AB444VH | HG-long | AB399VH | 48-22-36 |
| 287 | DVD3177L | AB444VL | LK-short | AB399VL | 49-13-37 |

TABLE 3
DVD Binding Proteins That Bind TNF and PGE2

| | | Outer | | Inner | |
|---|---|---|---|---|---|
| | DVD-Ig | Variable | | Variable | |
| | Variable | Domain | | Domain | |
| SEQ ID | Domain | Name | | Name | SEQ ID |
| NO | Name | (VD1) | Linker | (VD2) | NO |
| 288 | DVD2693H | AB436VH | GS-H10 | AB048VH | 38-29-50 |
| 289 | DVD2693L | AB436VL | GS-L10 | AB048VL | 39-30-51 |
| 290 | DVD2694H | AB436VH | HG-short | AB048VH | 38-21-50 |
| 291 | DVD2694L | AB436VL | LK-short | AB048VL | 39-13-51 |
| 292 | DVD2696H | AB436VH | HG-short | AB048VH | 38-21-50 |
| 293 | DVD2696L | AB436VL | LK-long | AB048VL | 39-14-51 |
| 294 | DVD2697H | AB436VH | HG-long | AB048VH | 38-22-50 |
| 295 | DVD2697L | AB436VL | LK-short | AB048VL | 39-13-51 |
| 296 | DVD2698H | AB048VH | GS-H10 | AB436VH | 50-29-38 |
| 297 | DVD2698L | AB048VL | GS-L10 | AB436VL | 51-30-39 |
| 298 | DVD2699H | AB048VH | HG-short | AB436VH | 50-21-38 |
| 299 | DVD2699L | AB048VL | LK-short | AB436VL | 51-13-39 |
| 300 | DVD2701H | AB048VH | HG-short | AB436VH | 50-21-38 |
| 301 | DVD2701L | AB048VL | LK-long | AB436VL | 51-14-39 |
| 302 | DVD2702H | AB048VH | HG-long | AB436VH | 50-22-38 |
| 303 | DVD2702L | AB048VL | LK-short | AB436VL | 51-13-39 |
| 304 | DVD2743H | AB437VH | GS-H10 | AB048VH | 40-29-50 |
| 305 | DVD2743L | AB437VL | GS-L10 | AB048VL | 41-30-51 |
| 306 | DVD2744H | AB437VH | HG-short | AB048VH | 40-21-50 |
| 307 | DVD2744L | AB437VL | LK-short | AB048VL | 41-13-51 |
| 308 | DVD2746H | AB437VH | HG-short | AB048VH | 40-21-50 |
| 309 | DVD2746L | AB437VL | LK-long | AB048VL | 41-14-51 |
| 310 | DVD2747H | AB437VH | HG-long | AB048VH | 40-22-50 |
| 311 | DVD2732L | AB437VL | LK-short | AB048VL | 41-13-51 |
| 312 | DVD2748H | AB048VH | GS-H10 | AB437VH | 50-29-40 |
| 313 | DVD2748L | AB048VL | GS-L10 | AB437VL | 51-30-41 |
| 314 | DVD2749H | AB048VH | HG-short | AB437VH | 50-21-40 |
| 315 | DVD2749L | AB048VL | LK-short | AB437VL | 51-13-41 |
| 316 | DVD2751L | AB048VH | HG-short | AB437VH | 50-21-40 |
| 317 | DVD2751L | AB048VL | LK-long | AB437VL | 51-14-41 |
| 318 | DVD2752H | AB048VH | HG-long | AB437VH | 50-22-40 |
| 319 | DVD2752L | AB048VL | LK-short | AB437VL | 51-13-41 |
| 320 | DVD2793H | AB441VH | GS-H10 | AB048VH | 42-29-50 |
| 321 | DVD2793L | AB441VL | GS-L10 | AB048VL | 43-30-51 |
| 322 | DVD2794H | AB441VH | HG-short | AB048VH | 42-21-50 |
| 323 | DVD2794L | AB441VL | LK-short | AB048VL | 43-13-51 |
| 324 | DVD2796H | AB441VH | HG-short | AB048VH | 42-21-50 |
| 325 | DVD2796L | AB441VL | LK-long | AB048VL | 43-14-51 |
| 326 | DVD2797H | AB441VH | HG-long | AB048VH | 42-22-50 |
| 327 | DVD2797L | AB441VL | LK-short | AB048VL | 43-13-51 |
| 328 | DVD2798H | AB048VH | GS-H10 | AB441VH | 50-29-42 |
| 329 | DVD2798L | AB048VL | GS-L10 | AB441VL | 51-30-43 |
| 330 | DVD2799H | AB048VH | HG-short | AB441VH | 50-21-42 |
| 331 | DVD2799L | AB048VL | LK-short | AB441VL | 51-13-43 |
| 332 | DVD2801H | AB048VH | HG-short | AB441VH | 50-21-42 |
| 333 | DVD2801L | AB048VL | LK-long | AB441VL | 51-14-43 |
| 334 | DVD2802H | AB048VH | HG-long | AB441VH | 50-22-42 |
| 335 | DVD2727L | AB048VL | LK-short | AB441VL | 51-13-43 |
| 336 | DVD3018H | AB444VH | GS-H10 | AB048VH | 48-29-50 |
| 337 | DVD3018L | AB444VL | GS-L10 | AB048VL | 49-30-51 |
| 338 | DVD3019H | AB444VH | HG-short | AB048VH | 48-21-50 |
| 339 | DVD3019L | AB444VL | LK-short | AB048VL | 49-13-51 |
| 340 | DVD3021H | AB444VH | HG-short | AB048VH | 48-21-50 |
| 341 | DVD3021L | AB444VL | LK-long | AB048VL | 49-14-51 |
| 342 | DVD3022H | AB444VH | HG-long | AB048VH | 48-22-50 |
| 343 | DVD3022L | AB444VL | LK-short | AB048VL | 49-13-51 |
| 344 | DVD3023H | AB048VH | GS-H10 | AB444VH | 50-29-48 |
| 345 | DVD3023L | AB048VL | GS-L10 | AB444VL | 51-30-49 |
| 346 | DVD3024H | AB048VH | HG-short | AB444VH | 50-21-48 |
| 347 | DVD3024L | AB048VL | LK-short | AB444VL | 51-13-49 |
| 348 | DVD3026L | AB048VH | HG-short | AB444VH | 50-21-48 |
| 349 | DVD3026L | AB048VL | LK-long | AB444VL | 51-14-49 |
| 350 | DVD3027H | AB048VH | HG-long | AB444VH | 50-22-48 |
| 351 | DVD3027L | AB048VL | LK-short | AB444VL | 51-13-49 |
| 352 | DVD3203H | AB436VH | GS-H10 | AB131VH | 38-29-52 |
| 353 | DVD3203L | AB436VL | GS-L10 | AB131VL | 39-30-53 |
| 354 | DVD3204H | AB436VH | HG-short | AB131VH | 38-21-52 |
| 355 | DVD3204L | AB436VL | LK-short | AB131VL | 39-13-53 |
| 356 | DVD3206H | AB436VH | HG-short | AB131VH | 38-21-52 |
| 357 | DVD3206L | AB436VL | LK-long | AB131VL | 39-14-53 |
| 358 | DVD3207H | AB436VH | HG-long | AB131VH | 38-22-52 |
| 359 | DVD3207L | AB436VL | LK-short | AB131VL | 39-13-53 |
| 360 | DVD3208H | AB131VH | GS-H10 | AB436VH | 52-29-38 |
| 361 | DVD3208L | AB131VL | GS-L10 | AB436VL | 53-30-39 |
| 362 | DVD3209H | AB131VH | HG-short | AB436VH | 52-21-38 |
| 363 | DVD3209L | AB131VL | LK-short | AB436VL | 53-13-39 |
| 364 | DVD3211H | AB131VH | HG-short | AB436VH | 52-21-38 |
| 365 | DVD3211L | AB131VL | LK-long | AB436VL | 53-14-39 |
| 366 | DVD3212H | AB131VH | HG-long | AB436VH | 52-22-38 |
| 367 | DVD3212L | AB131VL | LK-short | AB436VL | 53-13-39 |
| 368 | DVD3213H | AB437VH | GS-H10 | AB131VH | 40-29-52 |
| 369 | DVD3213L | AB437VL | GS-L10 | AB131VL | 41-30-53 |
| 370 | DVD3214H | AB437VH | HG-short | AB131VH | 40-21-52 |
| 371 | DVD3214L | AB437VL | LK-short | AB131VL | 41-13-53 |
| 372 | DVD3216H | AB437VH | HG-short | AB131VH | 40-21-52 |
| 373 | DVD3216L | AB437VL | LK-long | AB131VL | 41-14-53 |
| 374 | DVD3217H | AB437VH | HG-long | AB131VH | 40-22-52 |
| 375 | DVD3217L | AB437VL | LK-short | AB131VL | 41-13-53 |
| 376 | DVD3218H | AB131VH | GS-H10 | AB437VH | 52-29-40 |
| 377 | DVD3218L | AB131VL | GS-L10 | AB437VL | 53-30-41 |
| 378 | DVD3219H | AB131VH | HG-short | AB437VH | 52-21-40 |
| 379 | DVD3219L | AB131VL | LK-short | AB437VL | 53-13-41 |
| 380 | DVD3221H | AB131VH | HG-short | AB437VH | 52-21-40 |
| 381 | DVD3221L | AB131VL | LK-long | AB437VL | 53-14-41 |
| 382 | DVD3222H | AB131VH | HG-long | AB437VH | 52-22-40 |
| 383 | DVD3222L | AB131VL | LK-short | AB437VL | 53-13-41 |
| 384 | DVD3223H | AB441VH | GS-H10 | AB131VH | 42-29-52 |
| 385 | DVD3223L | AB441VL | GS-L10 | AB131VL | 43-30-53 |
| 386 | DVD3224H | AB441VH | HG-short | AB131VH | 42-21-52 |
| 387 | DVD3224L | AB441VL | LK-short | AB131VL | 43-13-53 |
| 388 | DVD3226H | AB441VH | HG-short | AB131VH | 42-21-52 |
| 389 | DVD3226L | AB441VL | LK-long | AB131VL | 43-14-53 |
| 390 | DVD3227H | AB441VH | HG-long | AB131VH | 42-22-52 |
| 391 | DVD3227L | AB441VL | LK-short | AB131VL | 43-13-53 |
| 392 | DVD3228H | AB131VH | GS-H10 | AB441VH | 52-29-42 |
| 393 | DVD3228L | AB131VL | GS-L10 | AB441VL | 53-30-43 |
| 394 | DVD3229H | AB131VH | HG-short | AB441VH | 52-21-42 |
| 395 | DVD3229L | AB131VL | LK-short | AB441VL | 53-13-43 |
| 396 | DVD3231L | AB131VH | HG-short | AB441VH | 52-21-42 |
| 397 | DVD3231L | AB131VL | LK-long | AB441VL | 53-14-43 |
| 398 | DVD3232H | AB131VH | HG-long | AB441VH | 52-22-42 |
| 399 | DVD3232L | AB131VL | LK-short | AB441VL | 53-13-43 |
| 400 | DVD3233H | AB444VH | GS-H10 | AB131VH | 48-29-52 |
| 401 | DVD3233L | AB444VL | GS-L10 | AB131VL | 49-30-53 |
| 402 | DVD3234H | AB444VH | HG-short | AB131VH | 48-21-52 |
| 403 | DVD3234L | AB444VL | LK-short | AB131VL | 49-13-53 |
| 404 | DVD3236H | AB444VH | HG-short | AB131VH | 48-21-52 |
| 405 | DVD3236L | AB444VL | LK-long | AB131VL | 49-14-53 |
| 406 | DVD3237H | AB444VH | HG-long | AB131VH | 48-22-52 |
| 407 | DVD3237L | AB444VL | LK-short | AB131VL | 49-13-53 |
| 408 | DVD3238H | AB131VH | GS-H10 | AB444VH | 52-29-48 |
| 409 | DVD3238L | AB131VL | GS-L10 | AB444VL | 53-30-49 |
| 410 | DVD3239H | AB131VH | HG-short | AB444VH | 52-21-48 |
| 411 | DVD3239L | AB131VL | LK-short | AB444VL | 53-13-49 |
| 412 | DVD3241H | AB131VH | HG-short | AB444VH | 52-21-48 |
| 413 | DVD3241L | AB131VL | LK-long | AB444VL | 53-14-49 |
| 414 | DVD3242H | AB131VH | HG-long | AB444VH | 52-22-48 |
| 415 | DVD3242L | AB131VL | LK-short | AB444VL | 53-13-49 |
| 416 | DVD3263H | AB436VH | GS-H10 | AB135VH | 38-29-54 |
| 417 | DVD3263L | AB436VL | GS-L10 | AB135VL | 39-30-55 |
| 418 | DVD3264H | AB436VH | HG-short | AB135VH | 38-21-54 |
| 419 | DVD3264L | AB436VL | LK-short | AB135VL | 39-13-55 |
| 420 | DVD3267H | AB131VH | HG-long | AB135VH | 52-22-54 |
| 421 | DVD3267L | AB131VL | LK-short | AB135VL | 53-13-55 |
| 422 | DVD3273H | AB131VH | GS-H10 | AB443VH | 52-29-46 |
| 423 | DVD3273L | AB131VL | GS-L10 | AB443VL | 53-30-47 |
| 424 | DVD3274H | AB131VH | HG-short | AB443VH | 52-21-46 |
| 425 | DVD3274L | AB131VL | LK-short | AB443VL | 53-13-47 |
| 426 | DVD3276H | AB131VH | HG-short | AB443VH | 52-21-46 |
| 427 | DVD3276L | AB131VL | LK-long | AB443VL | 53-14-47 |
| 428 | DVD3277H | AB131VH | HG-long | AB443VH | 52-22-46 |
| 429 | DVD3277L | AB131VL | LK-short | AB443VL | 53-13-47 |
| 430 | DVD3279H | AB135VH | HG-short | AB437VH | 54-21-40 |
| 431 | DVD3279L | AB135VL | LK-short | AB437VL | 55-13-41 |
| 432 | DVD3283H | AB441VH | GS-H10 | AB135VH | 42-29-54 |
| 433 | DVD3283L | AB441VL | GS-L10 | AB135VL | 43-30-55 |
| 434 | DVD3284H | AB441VH | HG-short | AB135VH | 42-21-54 |
| 435 | DVD3284L | AB441VL | LK-short | AB135VL | 43-13-55 |
| 436 | DVD3286H | AB441VH | HG-short | AB135VH | 42-21-54 |
| 437 | DVD3286L | AB441VL | LK-long | AB135VL | 43-14-55 |
| 438 | DVD2697H | AB441VH | HG-long | AB135VH | 42-22-54 |
| 439 | DVD2697L | AB441VL | LK-short | AB135VL | 43-13-55 |

TABLE 4
DVD Binding Proteins That Bind TNF and NGF

| | | Outer | | Inner | |
|---|---|---|---|---|---|
| | DVD-Ig | Variable | | Variable | |
| | Variable | Domain | | Domain | |
| SEQ ID | Domain | Name | | Name | SEQ ID |
| NO | Name | (VD1) | Linker | (VD2) | NO |
| 440 | DVD2713H | AB436VH | GS-H10 | AB267VH | 38-29-56 |
| 441 | DVD2713L | AB436VL | GS-L10 | AB267VL | 39-30-57 |
| 442 | DVD2714H | AB436VH | HG-short | AB267VH | 38-21-56 |
| 443 | DVD2714L | AB436VL | LK-short | AB267VL | 39-13-57 |
| 444 | DVD2716H | AB436VH | HG-short | AB267VH | 38-21-56 |
| 445 | DVD2716L | AB436VL | LK-long | AB267VL | 39-14-57 |
| 446 | DVD2717H | AB436VH | HG-long | AB267VH | 38-22-56 |
| 447 | DVD2717L | AB436VL | LK-short | AB267VL | 39-13-57 |
| 448 | DVD2718H | AB267VH | GS-H10 | AB436VH | 56-29-38 |
| 449 | DVD2718L | AB267VL | GS-L10 | AB436VL | 57-30-39 |
| 450 | DVD2719H | AB267VH | HG-short | AB436VH | 56-21-38 |
| 451 | DVD2719L | AB267VL | LK-short | AB436VL | 57-13-39 |
| 452 | DVD2721H | AB267VH | HG-short | AB436VH | 56-21-38 |
| 453 | DVD2721L | AB267VL | LK-long | AB436VL | 57-14-39 |
| 454 | DVD2722H | AB267VH | HG-long | AB436VH | 56-22-38 |
| 455 | DVD2722L | AB267VL | LK-short | AB436VL | 57-13-39 |
| 456 | DVD2763H | AB437VH | GS-H10 | AB267VH | 40-29-56 |
| 457 | DVD2763L | AB437VL | GS-L10 | AB267VL | 41-30-57 |
| 458 | DVD2764H | AB437VH | HG-short | AB267VH | 40-21-56 |
| 459 | DVD2764L | AB437VL | LK-short | AB267VL | 41-13-57 |
| 460 | DVD2766H | AB437VH | HG-short | AB267VH | 40-21-56 |
| 461 | DVD2766L | AB437VL | LK-long | AB267VL | 41-14-57 |
| 462 | DVD2767H | AB437VH | HG-long | AB267VH | 40-22-56 |
| 463 | DVD2767L | AB437VL | LK-short | AB267VL | 41-13-57 |
| 464 | DVD2768H | AB267VH | GS-H10 | AB437VH | 56-29-40 |
| 465 | DVD2768L | AB267VL | GS-L10 | AB437VL | 57-30-41 |
| 466 | DVD2769H | AB267VH | HG-short | AB437VH | 56-21-40 |
| 467 | DVD2769L | AB267VL | LK-short | AB437VL | 57-13-41 |
| 468 | DVD2771H | AB267VH | HG-short | AB437VH | 56-21-40 |
| 469 | DVD2771L | AB267VL | LK-long | AB437VL | 57-14-41 |
| 470 | DVD2772H | AB267VH | HG-long | AB437VH | 56-22-40 |
| 471 | DVD2772L | AB267VL | LK-short | AB437VL | 57-13-41 |
| 472 | DVD2813H | AB441VH | GS-H10 | AB267VH | 42-29-56 |
| 473 | DVD2813L | AB441VL | GS-L10 | AB267VL | 43-30-57 |
| 474 | DVD2814H | AB441VH | HG-short | AB267VH | 42-21-56 |
| 475 | DVD2814L | AB441VL | LK-short | AB267VL | 43-13-57 |
| 476 | DVD2816H | AB441VH | HG-short | AB267VH | 42-21-56 |
| 477 | DVD2816L | AB441VL | LK-long | AB267VL | 43-14-57 |
| 478 | DVD2817H | AB441VH | HG-long | AB267VH | 42-22-56 |
| 479 | DVD2817L | AB441VL | LK-short | AB267VL | 43-13-57 |
| 480 | DVD2818H | AB267VH | GS-H10 | AB441VH | 56-29-42 |
| 481 | DVD2818L | AB267VL | GS-L10 | AB441VL | 57-30-43 |
| 482 | DVD2819H | AB267VH | HG-short | AB441VH | 56-21-42 |
| 483 | DVD2819L | AB267VL | LK-short | AB441VL | 57-13-43 |
| 484 | DVD2821H | AB267VH | HG-short | AB441VH | 56-21-42 |
| 485 | DVD2821L | AB267VL | LK-long | AB441VL | 57-14-43 |
| 486 | DVD2822H | AB267VH | HG-long | AB441VH | 56-22-42 |
| 487 | DVD2822L | AB267VL | LK-short | AB441VL | 57-13-43 |
| 488 | DVD3038H | AB444VH | GS-H10 | AB267VH | 48-29-56 |
| 489 | DVD3038L | AB444VL | GS-L10 | AB267VL | 49-30-57 |
| 490 | DVD3039H | AB444VH | HG-short | AB267VH | 48-21-56 |
| 491 | DVD3039L | AB444VL | LK-short | AB267VL | 49-13-57 |
| 492 | DVD3041H | AB444VH | HG-short | AB267VH | 48-21-56 |
| 493 | DVD3041L | AB444VL | LK-long | AB267VL | 49-14-57 |
| 494 | DVD3042H | AB444VH | HG-long | AB267VH | 48-22-56 |
| 495 | DVD3042L | AB444VL | LK-short | AB267VL | 49-13-57 |
| 496 | DVD3043H | AB267VH | GS-H10 | AB444VH | 56-29-48 |
| 497 | DVD3043L | AB267VL | GS-L10 | AB444VL | 57-30-49 |
| 498 | DVD3044H | AB267VH | HG-short | AB444VH | 56-21-48 |
| 499 | DVD3044L | AB267VL | LK-short | AB444VL | 57-13-49 |
| 500 | DVD3046H | AB267VH | HG-short | AB444VH | 56-21-48 |
| 501 | DVD3046L | AB267VL | LK-long | AB444VL | 57-14-49 |
| 502 | DVD3047H | AB267VH | HG-long | AB444VH | 56-22-48 |
| 503 | DVD3047L | AB267VL | LK-short | AB444VL | 57-13-49 |

[0170] All DVD binding proteins listed above in Tables 2-4 comprise a human light chain Kappa constant region and a wild-type human heavy chain IgG1 constant region. The constant domain sequences are shown below in Table 4a.

TABLE 4a
Human IgG Heavy and Light Chain Constant Domains

| | SEQ | |
|---|---|---|
| | ID | Sequence |
| Protein | NO | 12345678901234567890123456789012345678901234567890123 |
| Wild type | | ASTKGPSVFPLAPSSKSTSGGTAALGCLVKDYFPEPVTVSWNSGALTSGVHTF |
| hIgG1 constant | | PAVLQSSGLYSLSSVVTVPSSSLGTQTYICNVNHKPSNTKVDKKVEPKSCDKT |
| region | | HTCPPCPAPELLGGPSVFLFPPKPKDTLMISRTPEVTCVVVDVSHEDPEVKFN |
| | | WYVDGVEVHNAKTKPREEQYNSTYRVVSVLTVLHQDWLNGKEYKCKVSNKALP |
| | | APIEKTISKAKGQPREPQVYTLPPSREEMTKNQVSLTCLVKGFYPSDIAVEWE |
| | | SNGQPENNYKTTPPVLDSDGSFFLYSKLTVDKSRWQQGNVFSCSVMHEALHNH |
| | | YTQKSLSLSPGK |
| Ig kappa | | TVAAPSVFIFPPSDEQLKSGTASVVCLLNNFYPREAKVQWKVDNALQSGNSQE |
| constant | | SVTEQDSKDSTYSLSSTLTLSKADYEKHKVYACEVTHQGLSSPVTKSFNRGEC |
| region | | |

### Example 2

### Assays Used to Determine the Functional Activity of Parent Antibodies and DVD-Ig Proteins

### Example 2.1

### IL-13 Bioassay and Neutralization Assay

[0171] A549 cells were plated at 1.5−2×10⁵ cells per well in a 100 μL volume and incubated overnight at 37° C., 5% CO₂. Following a 16-20 hour overnight incubation, the original 100 μl media seeding volume was removed and 100 μL of 400 ng/mL (2× concentrated) rhTNF-α was added to all wells. The plates were placed at 37° C., 5% CO₂ until the addition of IL-13 and antibody or DVD-Ig protein. A 20 μg/mL working stock of antibody or DVD-Ig protein (4× concentrated) was prepared in complete F12 medium. An eight point serial dilution was performed (5 μg/mL-0.0003 μg/mL) in complete F12 in Marsh dilution plates. Sixty uL/well of each antibody or DVD-Ig protein dilution was added in quadruplicate to a 96 well v-bottom (Costar#3894) plate and 60 μL of a 4× concentrated (20 ng/mL) solution of IL-13 was added to all wells except the cell only control. Following a 1 hour incubation, 100 μL of the above IL-13/Antibody or DVD-Ig protein complex was added to the A549 cells. All well volumes were equal to 200 μL. The final concentration of recombinant IL-13 was 5 ng/mL and rhTNF-α was 200 ng/mL. All plate reagents were then 1× concentrated. After a 16-20 hour incubation, the well contents (200 μL) were transferred into a 96-well round bottom plate (Costar#3799) and placed in a−20° C. freezer. The supernatants were tested for hTARC levels by ELISA in the Assay Lab. Neutralization potency was determined by calculating percent inhibition relative to the 5 ng/mL IL-13 alone control value. Reported IC₅₀ values (sigmoidal curve dose responses) were calculated using GraphPad Prism.

TABLE 5
IL-13 Neutralization Assay With IL-13
Parent Antibody and DVD-Ig Protein

| Parent | | | N-Terminal | C-Terminal |
|---|---|---|---|---|
| Antibody | N-terminal | C-terminal | VD IL13 | VD IL13 |
| or | Variable | Variable | Neutrali- | Neutrali- |
| DVD-Ig | Domain | Domain | zation | zation |
| ID | (VD) | (VD) | Assay IC50 nM | AssayIC50 nM |
| AB397 | IL-13 (seq 1) | | 0.066 | |
| AB398 | IL-13 (seq 2) | | 0.068 | |
| AB399 | IL-13 (seq 3) | | 0.075 | |
| DVD2683 | TNF (seq 1) | IL-13 (seq 1) | | 0.133 |
| DVD2684 | TNF (seq 1) | IL-13 (seq 1) | | 1.379 |
| DVD2686 | TNF (seq 1) | IL-13 (seq 1) | | 0.094 |
| DVD2687 | TNF (seq 1) | IL-13 (seq 1) | | 0.022 |
| DVD2688 | IL-13 (seq 1) | TNF (seq 1) | 0.094 | |
| DVD2689 | IL-13 (seq 1) | TNF (seq 1) | 0.147 | |
| DVD2691 | IL-13 (seq 1) | TNF (seq 1) | 0.105 | |
| DVD2692 | IL-13 (seq 1) | TNF (seq 1) | 0.131 | |
| DVD2733 | TNF (seq 2) | IL-13 (seq 1) | | 0.119 |
| DVD2734 | TNF (seq 2) | IL-13 (seq 1) | | 0.955 |
| DVD2736 | TNF (seq 2) | IL-13 (seq 1) | | 0.167 |
| DVD2737 | TNF (seq 2) | IL-13 (seq 1) | | 0.061 |
| DVD2738 | IL-13 (seq 1) | TNF (seq 2) | 0.149 | |
| DVD2739 | IL-13 (seq 1) | TNF (seq 2) | 0.132 | |
| DVD2741 | IL-13 (seq 1) | TNF (seq 2) | 0.118 | |
| DVD2742 | IL-13 (seq 1) | TNF (seq 2) | 0.064 | |
| DVD2783 | TNF (seq 3) | IL-13 (seq 1) | | 0.897 |
| DVD2784 | TNF (seq 3) | IL-13 (seq 1) | | 0.214 |
| DVD2786 | TNF (seq 3) | IL-13 (seq 1) | | 0.189 |
| DVD2787 | TNF (seq 3) | IL-13 (seq 1) | | 0.054 |
| DVD2788 | IL-13 (seq 1) | TNF (seq 3) | 0.072 | |
| DVD2789 | IL-13 (seq 1) | TNF (seq 3) | 0.078 | |
| DVD2791 | IL-13 (seq 1) | TNF (seq 3) | 0.245 | |
| DVD2792 | IL-13 (seq 1) | TNF (seq 3) | | 0.361 |
| DVD3008 | TNF (seq 4) | IL-13 (seq 1) | | 0.278 |
| DVD3009 | TNF (seq 4) | IL-13 (seq 1) | | 0.563 |
| DVD3011 | TNF (seq 4) | IL-13 (seq 1) | | 0.242 |
| DVD3012 | TNF (seq 4) | IL-13 (seq 1) | | 0.207 |
| DVD3013 | IL-13 (seq 1) | TNF (seq 4) | 0.077 | |
| DVD3014 | IL-13 (seq 1) | TNF (seq 4) | 0.132 | |
| DVD3016 | IL-13 (seq 1) | TNF (seq 4) | 0.081 | |
| DVD3017 | IL-13 (seq 1) | TNF (seq 4) | 0.111 | |
| DVD3083 | TNF (seq 1) | IL-13 (seq 2) | | 0.098 |
| DVD3084 | TNF (seq 1) | IL-13 (seq 2) | | 0.587 |
| DVD3086 | TNF (seq 1) | IL-13 (seq 2) | | 0.12 |
| DVD3087 | TNF (seq 1) | IL-13 (seq 2) | | 0.082 |
| DVD3088 | IL-13 (seq 2) | TNF (seq 1) | 0.103 | |
| DVD3089 | IL-13 (seq 2) | TNF (seq 1) | 0.074 | |
| DVD3091 | IL-13 (seq 2) | TNF (seq 1) | 0.056 | |
| DVD3092 | IL-13 (seq 2) | TNF (seq 1) | 0.06 | |
| DVD3093 | TNF (seq 2) | IL-13 (seq 2) | | 0.067 |
| DVD3094 | TNF (seq 2) | IL-13 (seq 2) | | 0.444 |
| DVD3096 | TNF (seq 2) | IL-13 (seq 2) | | 0.064 |
| DVD3097 | TNF (seq 2) | IL-13 (seq 2) | | 0.072 |
| DVD3098 | IL-13 (seq 2) | TNF (seq 2) | 0.059 | |
| DVD3099 | IL-13 (seq 2) | TNF (seq 2) | 0.014 | |
| DVD3101 | IL-13 (seq 2) | TNF (seq 2) | 0.037 | |
| DVD3102 | IL-13 (seq 2) | TNF (seq 2) | 0.025 | |
| DVD3103 | TNF (seq 3) | IL-13 (seq 2) | | 0.042 |
| DVD3104 | TNF (seq 3) | IL-13 (seq 2) | | 1.052 |
| DVD3106 | TNF (seq 3) | IL-13 (seq 2) | | 0.074 |
| DVD3107 | TNF (seq 3) | IL-13 (seq 2) | | 0.029 |
| DVD3108 | IL-13 (seq 2) | TNF (seq 3) | | |
| DVD3109 | IL-13 (seq 2) | TNF (seq 3) | 0.044 | |
| DVD3111 | IL-13 (seq 2) | TNF (seq 3) | 0.018 | |
| DVD3112 | IL-13 (seq 2) | TNF (seq 3) | 0.017 | |
| DVD3113 | TNF (seq 4) | IL-13 (seq 2) | | 0.065 |
| DVD3114 | TNF (seq 4) | IL-13 (seq 2) | | 0.781 |
| DVD3116 | TNF (seq 4) | IL-13 (seq 2) | | 0.081 |
| DVD3117 | TNF (seq 4) | IL-13 (seq 2) | | 0.015 |
| DVD3118 | IL-13 (seq 2) | TNF (seq 4) | 0.013 | |
| DVD3119 | IL-13 (seq 2) | TNF (seq 4) | 0.051 | |
| DVD3121 | IL-13 (seq 2) | TNF (seq 4) | 0.013 | |
| DVD3122 | IL-13 (seq 2) | TNF (seq 4) | 0.011 | |
| DVD3143 | TNF (seq 1) | IL-13 (seq 3) | | 0.057 |
| DVD3144 | TNF (seq 1) | IL-13 (seq 3) | | 0.209 |
| DVD3146 | TNF (seq 1) | IL-13 (seq 3) | | 0.051 |
| DVD3147 | TNF (seq 1) | IL-13 (seq 3) | | 0.745 |
| DVD3153 | TNF (seq 2) | IL-13 (seq 3) | | 0.064 |
| DVD3154 | TNF (seq 2) | IL-13 (seq 3) | | 0.175 |
| DVD3156 | TNF (seq 2) | IL-13 (seq 3) | | 0.062 |
| DVD3157 | TNF (seq 2) | IL-13 (seq 3) | | 0.035 |
| DVD3158 | IL-13 (seq 3) | TNF (seq 2) | 0.137 | |
| DVD3159 | IL-13 (seq 3) | TNF (seq 2) | 0.087 | |
| DVD3163 | TNF (seq 3) | IL-13 (seq 3) | | 0.076 |
| DVD3164 | TNF (seq 3) | IL-13 (seq 3) | | 0.335 |
| DVD3166 | TNF (seq 3) | IL-13 (seq 3) | | 0.072 |
| DVD3167 | TNF (seq 3) | IL-13 (seq 3) | | 0.046 |
| DVD3168 | IL-13 (seq 3) | TNF (seq 3) | 0.081 | |
| DVD3169 | IL-13 (seq 3) | TNF (seq 3) | 0.089 | |
| DVD3173 | TNF (seq 4) | IL-13 (seq 3) | | 0.079 |
| DVD3174 | TNF (seq 4) | IL-13 (seq 3) | | 0.527 |
| DVD3176 | TNF (seq 4) | IL-13 (seq 3) | | 0.152 |
| DVD3177 | TNF (seq 4) | IL-13 (seq 3) | | 0.078 |

[0172] All DVD-Ig proteins containing VDs from AB397, AB398, or AB399 in either the N-terminal or C-terminal position showed neutralization in the A549 IL-13 neutralization assay.

### Example 2.2

### PGE2 Bioassay and Neutralization Assay

[0173] The ability of anti-PGE2 antibodies and anti-PGE2 containing DVD-Ig molecules to inhibit the cellular response of PGE2 was determined in a Ca++ flux assay in HEK293Gα16 cells stably transfected with human EP4 receptor. Cells were plated in black/clear poly-D-lysine plates, (Corning #3667, Corning, N.Y.) and incubated with Ca++ sensitive dye (Molecular Devices) for 90 minutes. Stock PGE2 (in 200 proof ethanol) was diluted with FLIPR buffer (containing 1×HBSS (Invitrogen, Carlsbad, Calif.), 20 mM HEPES (Invitrogen, Carlsbad, Calif.), 0.1% BSA (Sigma, St. Louis, Mo.) and 2.5 mM Probenecid (Sigma, St. Louis, Mo.)). Anti-PGE2 antibodies, DVD-Ig molecules or isotype matched control antibodies were also pre-diluted in FLIPR buffer. 25 μl of PGE2 or pre-incubated PGE2/antibody mixture or pre-incubated PGE2/DVD-Ig molecule mixture was added to the wells pre-plated with cells. A dose response of PGE2 was done by a serial titration of PGE2 and was determined FLIPR1 or Tetra (Molecular Devices). EC50 was determined using GraphPad Prism 5 (GraftPad Software, La Jolla, Calif.). For testing antibodies and DVD-Ig molecules, PGE2 at EC50 concentration was incubated with varying concentrations of test articles or isotype matched antibody (negative control) for 20 minutes, added to dye-loaded human EP4 in HEK293Gα16 cells. Ca++ flux was monitored using FLIPR1 and data was analyzed using GraphPad Prism 5. PGE2 inhibition results are shown in Table 6 for the DVD-Ig constructs that contain the different TNF sequences.

TABLE 6
PGE2 Neutralization Assay With PGE2 Parent Antibody and DVD-Ig Protein

| | | | N-Terminal VD | C-Terminal VD |
|---|---|---|---|---|
| Parent | N-terminal | C-terminal | PGE2 | PGE2 |
| Antibody | Variable | Variable | Neutralization | Neutralization |
| or DVD-Ig ID | Domain (VD) | Domain (VD) | Assay IC50 nM | Assay IC50 nM |
| AB048 | PGE2 (seq 1) | | 0.401 | |
| AB131 | PGE2 (seq 2) | | 29.66 | |
| AB135 | PGE2 (seq 3) | | N/A | |
| DVD2693 | TNF (seq 1) | PGE2 seq 1 | | 0.719 |
| DVD2694 | TNF (seq 1) | PGE2 seq 1 | | 0.886 |
| DVD2696 | TNF (seq 1) | PGE2 seq 1 | | 0.7 |
| DVD2697 | TNF (seq 1) | PGE2 seq 1 | | 0.571 |
| DVD2698 | PGE2 seq 1 | TNF (seq 1) | 0.856 | |
| DVD2699 | PGE2 seq 1 | TNF (seq 1) | 0.869 | |
| DVD2701 | PGE2 seq 1 | TNF (seq 1) | 0.869 | |
| DVD2702 | PGE2 seq 1 | TNF (seq 1) | 0.801 | |
| DVD2743 | TNF (seq 2) | PGE2 seq 1 | | 0.647 |
| DVD2744 | TNF (seq 2) | PGE2 seq 1 | | 0.507 |
| DVD2746 | TNF (seq 2) | PGE2 seq 1 | | 1.136 |
| DVD2747 | TNF (seq 2) | PGE2 seq 1 | | 0.722 |
| DVD2748 | PGE2 seq 1 | TNF (seq 2) | 0.994 | |
| DVD2749 | PGE2 seq 1 | TNF (seq 2) | 0.566 | |
| DVD2751 | PGE2 seq 1 | TNF (seq 2) | 0.552 | |
| DVD2752 | PGE2 seq 1 | TNF (seq 2) | 0.949 | |
| DVD2793 | TNF (seq 3) | PGE2 seq 1 | | 0.366 |
| DVD2794 | TNF (seq 3) | PGE2 seq 1 | | 0.493 |
| DVD2796 | TNF (seq 3) | PGE2 seq 1 | | 0.589 |
| DVD2797 | TNF (seq 3) | PGE2 seq 1 | | 0.646 |
| DVD2798 | PGE2 seq 1 | TNF (seq 3) | 0.523 | |
| DVD2799 | PGE2 seq 1 | TNF (seq 3) | 0.597 | |
| DVD2801 | PGE2 seq 1 | TNF (seq 3) | 0.904 | |
| DVD2802 | PGE2 seq 1 | TNF (seq 3) | 0.883 | |
| DVD3018 | TNF (seq 4) | PGE2 seq 1 | | 0.461 |
| DVD3019 | TNF (seq 4) | PGE2 seq 1 | | 0.460 |
| DVD3021 | TNF (seq 4) | PGE2 seq 1 | | 0.612 |
| DVD3022 | TNF (seq 4) | PGE2 seq 1 | | 0.344 |
| DVD3023 | PGE2 seq 1 | TNF (seq 4) | 0.876 | |
| DVD3024 | PGE2 seq 1 | TNF (seq 4) | 0.663 | |
| DVD3026 | PGE2 seq 1 | TNF (seq 4) | 0.639 | |
| DVD3027 | PGE2 seq 1 | TNF (seq 4) | 0.396 | |
| DVD3203 | TNF (seq 1) | PGE2 (AB016) | | 34.78 |
| | | seq 2 | | |
| DVD3204 | TNF (seq 1) | PGE2 (AB016) | | 34.5 |
| | | seq 2 | | |
| DVD3206 | TNF (seq 1) | PGE2 (AB016) | | 10.01 |
| | | seq 2 | | |
| DVD3207 | TNF (seq 1) | PGE2 (AB016) | | 12.05 |
| | | seq 2 | | |
| DVD3208 | PGE2 (AB016) | TNF (seq 1) | 20.49 | |
| | seq 2 | | | |
| DVD3209 | PGE2 (AB016) | TNF (seq 1) | 109.7 | |
| | seq 2 | | | |
| DVD3211 | PGE2 (AB016) | TNF (seq 1) | 31.27 | |
| | seq 2 | | | |
| DVD3212 | PGE2 (AB016) | TNF (seq 1) | 20.86 | |
| | seq 2 | | | |
| DVD3213 | TNF (seq 2) | PGE2 (AB016) | | 29.58 |
| | | seq 2 | | |
| DVD3214 | TNF (seq 2) | PGE2 (AB016) | | 23.35 |
| | | seq 2 | | |
| DVD3216 | TNF (seq 2) | PGE2 (AB016) | | 68735 |
| | | seq 2 | | |
| DVD3217 | TNF (seq 2) | PGE2 (AB016) | | >100000 |
| | | seq 2 | | |
| DVD3218 | PGE2 (AB016) | TNF (seq 2) | 60.14 | |
| | seq 2 | | | |
| DVD3219 | PGE2 (AB016) | TNF (seq 2) | >100000 | |
| | seq 2 | | | |
| DVD3221 | PGE2 (AB016) | TNF (seq 2) | >100000 | |
| | seq 2 | | | |
| DVD3222 | PGE2 (AB016) | TNF (seq 2) | >100000 | |
| | | seq 2 | | |
| DVD3223 | TNF (seq 3) | PGE2 (AB016) | | >100000 |
| | | seq 2 | | |
| DVD3224 | TNF (seq 3) | PGE2 (AB016) | | >100000 |
| | | seq 2 | | |
| DVD3226 | TNF (seq 3) | PGE2 (AB016) | | >100000 |
| | | seq 2 | | |
| DVD3227 | TNF (seq 3) | PGE2 (AB016) | | >100000 |
| | | seq 2 | | |
| DVD3228 | PGE2 (AB016) | TNF (seq 3) | 34.96 | |
| | seq 2 | | | |
| DVD3229 | PGE2 (AB016) | TNF (seq 3) | 124.8 | |
| | seq 2 | | | |
| DVD3231 | PGE2 (AB016) | TNF (seq 3) | >100000 | |
| | seq 2 | | | |
| DVD3232 | PGE2 (AB016) | TNF (seq 3) | 11.25 | |
| | seq 2 | | | |
| DVD3233 | TNF (seq 4) | PGE2 (AB016) | | 27.26 |
| | | seq 2 | | |
| DVD3234 | TNF (seq 4) | PGE2 (AB016) | | 111.3 |
| | | seq 2 | | |
| DVD3236 | TNF (seq 4) | PGE2 (AB016) | | >100000 |
| | | seq 2 | | |
| DVD3237 | TNF (seq 4) | PGE2 (AB016) | | >100000 |
| | | seq 2 | | |
| DVD3238 | PGE2 (AB016) | TNF (seq 4) | 1186 | |
| | seq 2 | | | |
| DVD3239 | PGE2 (AB016) | TNF (seq 4) | 62.05 | |
| | seq 2 | | | |
| DVD3241 | PGE2 (AB016) | TNF (seq 4) | >100000 | |
| | seq 2 | | | |
| DVD3242 | PGE2 (AB016) | TNF (seq 4) | >100000 | |
| | seq 2 | | | |
| DVD3263 | TNF (seq 1) | PGE2 (AB022) | | 9.203 |
| | | seq 3 | | |
| DVD3264 | TNF (seq 1) | PGE2 (AB022) | | 30.21 |
| | | seq 3 | | |
| DVD3267 | TNF (seq 1) | PGE2 (AB022) | | 6.832 |
| | | seq 3 | | |
| DVD3273 | TNF (seq 2) | PGE2 (AB022) | | 11.91 |
| | | seq 3 | | |
| DVD3274 | TNF (seq 2) | PGE2 (AB022) | | 34.84 |
| | | seq 3 | | |
| DVD3276 | TNF (seq 2) | PGE2 (AB022) | | 27048 |
| | | seq 3 | | |
| DVD3277 | TNF (seq 2) | PGE2 (AB022) | | 32.08 |
| | | seq 3 | | |
| DVD3279 | PGE2 (AB022) | TNF (seq 2) | 30.71 | |
| | seq 3 | | | |
| DVD3283 | TNF (seq 3) | PGE2 (AB022) | | 21.94 |
| | | seq 3 | | |
| DVD3284 | TNF (seq 3) | PGE2 (AB022) | | 47.6 |
| | | seq 3 | | |
| DVD3286 | TNF (seq 3) | PGE2 (AB022) | | 65.22 |
| | | seq 3 | | |
| DVD3287 | TNF (seq 3) | PGE2 (AB022) | | 257 |
| | | seq 3 | | |

[0174] All DVD-Ig proteins containing VDs from AB048, AB131, or AB135 in either the N-terminal or C-terminal position showed neutralization in the EP4 PGE2 neutralization assay.

### Example 2.3

### HuTNFα Bioassay and Neutralization Assay

[0175] L929 cells were grown to a semi-confluent density and harvested using 0.05% tryspin (Gibco#25300). The cells were washed with PBS, counted and resuspended at 1E6 cells/mL in assay media containing 4 μg/mL actinomycin D. The cells were seeded in a 96-well plate (Costar#3599) at a volume of 50 μl and 5E4 cells/well. The DVD-Ig™ and control IgG were diluted to a 4× concentration in assay media and serial 1:3 dilutions were prepared. The huTNFα was diluted to 400 pg/ml in assay media. An antibody sample (200 μl) was added to the huTNFα (200 μL) in a 1:2 dilution scheme and allowed to incubate for 0.5 hour at room temperature.

[0176] The DVD-Ig™/huTNFα solution was added to the plated cells at 100 μl for a final concentration of 100 pg/mL huTNFα and 25 nM-0.00014 nM DVD-Ig™. The plates were incubated for 20 hours at 37° C., 5% CO₂. To quantitate viability, 100 μL was removed from the wells and 10 μL of WST-1 reagent (Roche cat#11644807001) was added. Plates were incubated under assay conditions for 3.5 hours, centrifuged at 500×g and 75 μL supernatant transferred to an ELISA plate (Costar cat#3369). The plates were read at OD 420-600 nm on a Spectromax 190 ELISA plate reader. An average EC50 from several assays is included in Table 7 for the DVD-Ig constructs containing the various TNF sequences.

TABLE 7
huTNFα Neutralization Assay With TNFα Parent Antibody and DVD-Ig Protein

| Parent | | | N-Terminal VD | C-Terminal VD |
|---|---|---|---|---|
| Antibody | N-terminal | C-terminal | huTNFα | huTNFα |
| or DVD-Ig | Variable | Variable | Neutralization | Neutralization |
| ID | Domain (VD) | Domain (VD) | Assay IC50 nM | Assay IC50 nM |
| AB436 | TNF (seq 1) | | 0.006 | |
| AB437 | TNF (seq 2) | | 0.012 | |
| AB441 | TNF (seq 3) | | 0.037 | |
| AB444 | TNF (seq 4) | | 0.034 | |
| DVD2683 | TNF (seq 1) | IL-13 (seq 1) | 0.006 | |
| DVD2684 | TNF (seq 1) | IL-13 (seq 1) | 0.007 | |
| DVD2686 | TNF (seq 1) | IL-13 (seq 1) | 0.103 | |
| DVD2687 | TNF (seq 1) | IL-13 (seq 1) | 0.048 | |
| DVD2688 | IL-13 (seq 1) | TNF (seq 1) | | 0.093 |
| DVD2689 | IL-13 (seq 1) | TNF (seq 1) | | 0.076 |
| DVD2691 | IL-13 (seq 1) | TNF (seq 1) | | 0.041 |
| DVD2692 | IL-13 (seq 1) | TNF (seq 1) | | 0.04 |
| DVD2733 | TNF (seq 2) | IL-13 (seq 1) | 0.009 | |
| DVD2734 | TNF (seq 2) | IL-13 (seq 1) | 0.017 | |
| DVD2736 | TNF (seq 2) | IL-13 (seq 1) | 0.009 | |
| DVD2737 | TNF (seq 2) | IL-13 (seq 1) | 0.012 | |
| DVD2738 | IL-13 (seq 1) | TNF (seq 2) | | 0.452 |
| DVD2739 | IL-13 (seq 1) | TNF (seq 2) | | 0.517 |
| DVD2741 | IL-13 (seq 1) | TNF (seq 2) | | 0.202 |
| DVD2742 | IL-13 (seq 1) | TNF (seq 2) | | 0.129 |
| DVD2783 | TNF (seq 3) | IL-13 (seq 1) | 0.008 | |
| DVD2784 | TNF (seq 3) | IL-13 (seq 1) | 0.006 | |
| DVD2786 | TNF (seq 3) | IL-13 (seq 1) | 0.008 | |
| DVD2787 | TNF (seq 3) | IL-13 (seq 1) | 0.005 | |
| DVD2788 | IL-13 (seq 1) | TNF (seq 3) | | 0.23 |
| DVD2789 | IL-13 (seq 1) | TNF (seq 3) | | 0.186 |
| DVD2791 | IL-13 (seq 1) | TNF (seq 3) | | 0.064 |
| DVD2792 | IL-13 (seq 1) | TNF (seq 3) | | 0.136 |
| DVD3008 | TNF (seq 4) | IL-13 (seq 1) | 0.029 | |
| DVD3009 | TNF (seq 4) | IL-13 (seq 1) | 0.031 | |
| DVD3011 | TNF (seq 4) | IL-13 (seq 1) | 0.024 | |
| DVD3012 | TNF (seq 4) | IL-13 (seq 1) | 0.034 | |
| DVD3013 | IL-13 (seq 1) | TNF (seq 4) | | 0.229 |
| DVD3014 | IL-13 (seq 1) | TNF (seq 4) | | 0.49 |
| DVD3016 | IL-13 (seq 1) | TNF (seq 4) | | 0.148 |
| DVD3017 | IL-13 (seq 1) | TNF (seq 4) | | 0.234 |
| DVD3083 | TNF (seq 1) | IL-13 (seq 2) | 0.011 | |
| DVD3084 | TNF (seq 1) | IL-13 (seq 2) | 0.014 | |
| DVD3086 | TNF (seq 1) | IL-13 (seq 2) | 0.023 | |
| DVD3087 | TNF (seq 1) | IL-13 (seq 2) | 0.015 | |
| DVD3088 | IL-13 (seq 2) | TNF (seq 1) | | 0.472 |
| DVD3089 | IL-13 (seq 2) | TNF (seq 1) | | 0.52 |
| DVD3091 | IL-13 (seq 2) | TNF (seq 1) | | 0.192 |
| DVD3092 | IL-13 (seq 2) | TNF (seq 1) | | 0.096 |
| DVD3093 | TNF (seq 2) | IL-13 (seq 2) | 0.012 | |
| DVD3094 | TNF (seq 2) | IL-13 (seq 2) | 0.021 | |
| DVD3096 | TNF (seq 2) | IL-13 (seq 2) | 0.019 | |
| DVD3097 | TNF (seq 2) | IL-13 (seq 2) | 0.019 | |
| DVD3098 | IL-13 (seq 2) | TNF (seq 2) | 0.012 | |
| DVD3099 | IL-13 (seq 2) | TNF (seq 2) | 0.003 | |
| DVD3101 | IL-13 (seq 2) | TNF (seq 2) | | 0.308 |
| DVD3102 | IL-13 (seq 2) | TNF (seq 2) | | 0.294 |
| DVD3103 | TNF (seq 3) | IL-13 (seq 2) | 0.016 | |
| DVD3104 | TNF (seq 3) | IL-13 (seq 2) | 0.033 | |
| DVD3106 | TNF (seq 3) | IL-13 (seq 2) | 0.018 | |
| DVD3107 | TNF (seq 3) | IL-13 (seq 2) | 0.015 | |
| DVD3108 | IL-13 (seq 2) | TNF (seq 3) | | 0.183 |
| DVD3109 | IL-13 (seq 2) | TNF (seq 3) | | 0.731 |
| DVD3111 | IL-13 (seq 2) | TNF (seq 3) | | 0.146 |
| DVD3112 | IL-13 (seq 2) | TNF (seq 3) | | 0.387 |
| DVD3113 | TNF (seq 4) | IL-13 (seq 2) | 0.01 | |
| DVD3114 | TNF (seq 4) | IL-13 (seq 2) | 0.016 | |
| DVD3116 | TNF (seq 4) | IL-13 (seq 2) | 0.025 | |
| DVD3117 | TNF (seq 4) | IL-13 (seq 2) | 1.96 | |
| DVD3118 | IL-13 (seq 2) | TNF (seq 4) | | 0.065 |
| DVD3119 | IL-13 (seq 2) | TNF (seq 4) | | 0.163 |
| DVD3121 | IL-13 (seq 2) | TNF (seq 4) | | 0.036 |
| DVD3122 | IL-13 (seq 2) | TNF (seq 4) | | 0.018 |
| DVD3143 | TNF (seq 1) | IL-13 (seq 3) | 0.008 | |
| DVD3144 | TNF (seq 1) | IL-13 (seq 3) | 0.007 | |
| DVD3146 | TNF (seq 1) | IL-13 (seq 3) | 0.006 | |
| DVD3147 | TNF (seq 1) | IL-13 (seq 3) | 0.007 | |
| DVD3153 | TNF (seq 2) | IL-13 (seq 3) | 0.021 | |
| DVD3154 | TNF (seq 2) | IL-13 (seq 3) | 0.013 | |
| DVD3156 | TNF (seq 2) | IL-13 (seq 3) | 0.022 | |
| DVD3157 | TNF (seq 2) | IL-13 (seq 3) | 0.012 | |
| DVD3158 | IL-13 (seq 3) | TNF (seq 2) | | 0.62 |
| DVD3159 | IL-13 (seq 3) | TNF (seq 2) | | 0.414 |
| DVD3163 | TNF (seq 3) | IL-13 (seq 3) | 0.015 | |
| DVD3164 | TNF (seq 3) | IL-13 (seq 3) | 0.021 | |
| DVD3166 | TNF (seq 3) | IL-13 (seq 3) | 0.016 | |
| DVD3167 | TNF (seq 3) | IL-13 (seq 3) | 0.018 | |
| DVD3168 | IL-13 (seq 3) | TNF (seq 3) | | 0.146 |
| DVD3169 | IL-13 (seq 3) | TNF (seq 3) | | 0.169 |
| DVD3173 | TNF (seq 4) | IL-13 (seq 3) | 0.009 | |
| DVD3174 | TNF (seq 4) | IL-13 (seq 3) | 0.014 | |
| DVD3176 | TNF (seq 4) | IL-13 (seq 3) | 0.015 | |
| DVD3177 | TNF (seq 4) | IL-13 (seq 3) | 0.022 | |
| DVD2693 | TNF (seq 1) | PGE2 seq 1 | 0.001 | |
| DVD2694 | TNF (seq 1) | PGE2 seq 1 | 0.001 | |
| DVD2696 | TNF (seq 1) | PGE2 seq 1 | NA | |
| DVD2697 | TNF (seq 1) | PGE2 seq 1 | 0.000 | |
| DVD2698 | PGE2 seq 1 | TNF (seq 1) | | 0.085 |
| DVD2699 | PGE2 seq 1 | TNF (seq 1) | | 0.064 |
| DVD2701 | PGE2 seq 1 | TNF (seq 1) | | 0.036 |
| DVD2702 | PGE2 seq 1 | TNF (seq 1) | | 0.106 |
| DVD2743 | TNF (seq 2) | PGE2 seq 1 | 0.006 | |
| DVD2744 | TNF (seq 2) | PGE2 seq 1 | 0.003 | |
| DVD2746 | TNF (seq 2) | PGE2 seq 1 | 0.006 | |
| DVD2747 | TNF (seq 2) | PGE2 seq 1 | 0.003 | |
| DVD2748 | PGE2 seq 1 | TNF (seq 2) | | 2.876 |
| DVD2749 | PGE2 seq 1 | TNF (seq 2) | | NA |
| DVD2751 | PGE2 seq 1 | TNF (seq 2) | | NA |
| DVD2752 | PGE2 seq 1 | TNF (seq 2) | | 0.384 |
| DVD2793 | TNF (seq 3) | PGE2 seq 1 | 0.006 | |
| DVD2794 | TNF (seq 3) | PGE2 seq 1 | 0.003 | |
| DVD2796 | TNF (seq 3) | PGE2 seq 1 | 0.010 | |
| DVD2797 | TNF (seq 3) | PGE2 seq 1 | 0.002 | |
| DVD2798 | PGE2 seq 1 | TNF (seq 3) | | 0.381 |
| DVD2799 | PGE2 seq 1 | TNF (seq 3) | | 3.076 |
| DVD2801 | PGE2 seq 1 | TNF (seq 3) | | 0.116 |
| DVD2802 | PGE2 seq 1 | TNF (seq 3) | | 0.195 |
| DVD3018 | TNF (seq 4) | PGE2 seq 1 | 0.008 | |
| DVD3019 | TNF (seq 4) | PGE2 seq 1 | 0.009 | |
| DVD3021 | TNF (seq 4) | PGE2 seq 1 | 0.007 | |
| DVD3022 | TNF (seq 4) | PGE2 seq 1 | 0.016 | |
| DVD3023 | PGE2 seq 1 | TNF (seq 4) | | 0.203 |
| DVD3024 | PGE2 seq 1 | TNF (seq 4) | | 0.934 |
| DVD3026 | PGE2 seq 1 | TNF (seq 4) | | 0.038 |
| DVD3027 | PGE2 seq 1 | TNF (seq 4) | | 0.076 |
| DVD3203 | TNF (seq 1) | PGE2 (AB016) | 0.071 | |
| | | seq 2 | | |
| DVD3204 | TNF (seq 1) | PGE2 (AB016) | 0.001 | |
| | | seq 2 | | |
| DVD3206 | TNF (seq 1) | PGE2 (AB016) | 0.001 | |
| | | seq 2 | | |
| DVD3207 | TNF (seq 1) | PGE2 (AB016) | 0.005 | |
| | | seq 2 | | |
| DVD3208 | PGE2 (AB016) | TNF (seq 1) | | 0.172 |
| | seq 2 | | | |
| DVD3209 | PGE2 (AB016) | TNF (seq 1) | | 0.536 |
| | seq 2 | | | |
| DVD3211 | PGE2 (AB016) | TNF (seq 1) | | 0.014 |
| | seq 2 | | | |
| DVD3212 | PGE2 (AB016) | TNF (seq 1) | | 0.039 |
| | seq 2 | | | |
| DVD3213 | TNF (seq 2) | PGE2 (AB016) | 0.010 | |
| | | seq 2 | | |
| DVD3214 | TNF (seq 2) | PGE2 (AB016) | 0.020 | |
| | | seq 2 | | |
| DVD3216 | TNF (seq 2) | PGE2 (AB016) | 0.022 | |
| | | seq 2 | | |
| DVD3217 | TNF (seq 2) | PGE2 (AB016) | 0.008 | |
| | | seq 2 | | |
| DVD3218 | PGE2 (AB016) | TNF (seq 2) | | 0.413 |
| | seq 2 | | | |
| DVD3219 | PGE2 (AB016) | TNF (seq 2) | | 2.102 |
| | seq 2 | | | |
| DVD3221 | PGE2 (AB016) | TNF (seq 2) | | 0.479 |
| | seq 2 | | | |
| VD3222 | PGE2 (AB016) | TNF (seq 2) | | 0.243 |
| | seq 2 | | | |
| DVD3223 | TNF (seq 3) | PGE2 (AB016) | 0.002 | |
| | | seq 2 | | |
| DVD3224 | TNF (seq 3) | PGE2 (AB016) | 0.004 | |
| | | seq 2 | | |
| DVD3226 | TNF (seq 3) | PGE2 (AB016) | 0.011 | |
| | | seq 2 | | |
| DVD3227 | TNF (seq 3) | PGE2 (AB016) | 0.002 | |
| | | seq 2 | | |
| DVD3228 | PGE2 (AB016) | TNF (seq 3) | | 0.052 |
| | seq 2 | | | |
| DVD3229 | PGE2 (AB016) | TNF (seq 3) | | 0.086 |
| | seq 2 | | | |
| DVD3231 | PGE2 (AB016) | TNF (seq 3) | | 0.112 |
| | seq 2 | | | |
| DVD3232 | PGE2 (AB016) | TNF (seq 3) | | 0.254 |
| | seq 2 | | | |
| DVD3233 | TNF (seq 4) | PGE2 (AB016) | 0.005 | |
| | | seq 2 | | |
| DVD3234 | TNF (seq 4) | PGE2 (AB016) | 0.009 | |
| | | seq 2 | | |
| DVD3236 | TNF (seq 4) | PGE2 (AB016) | 0.006 | |
| | | seq 2 | | |
| DVD3237 | TNF (seq 4) | PGE2 (AB016) | 0.010 | |
| | | seq 2 | | |
| DVD3238 | PGE2 (AB016) | TNF (seq 4) | | 0.168 |
| | seq 2 | | | |
| DVD3239 | PGE2 (AB016) | TNF (seq 4) | | 1.616 |
| | seq 2 | | | |
| DVD3241 | PGE2 (AB016) | TNF (seq 4) | | 0.112 |
| | seq 2 | | | |
| DVD3242 | PGE2 (AB022) | TNF (seq 4) | | 0.130 |
| | seq 2 | | | |
| DVD3263 | TNF (seq 1) | PGE2 (AB022) | 0.008 | |
| | | seq 3 | | |
| DVD3264 | TNF (seq 1) | PGE2 (AB022) | 0.006 | |
| | | seq 3 | | |
| DVD3267 | TNF (seq 1) | PGE2 (AB022) | 0.002 | |
| | | seq 3 | | |
| DVD3273 | TNF (seq 2) | PGE2 (AB022) | 0.020 | |
| | | seq 3 | | |
| DVD3274 | TNF (seq 2) | PGE2 (AB022) | 0.008 | |
| | | seq 3 | | |
| DVD3276 | TNF (seq 2) | PGE2 (AB022) | 0.083 | |
| | | seq 3 | | |
| DVD3277 | TNF (seq 2) | PGE2 (AB022) | 0.051 | |
| | | seq 3 | | |
| DVD3279 | PGE2 (AB022) | TNF (seq 2) | | |
| | seq 3 | | | |
| DVD3283 | TNF (seq 3) | PGE2 (AB022) | 0.002 | |
| | | seq 3 | | |
| DVD3284 | TNF (seq 3) | PGE2 (AB022) | 0.012 | |
| | | seq 3 | | |
| DVD3286 | TNF (seq 3) | PGE2 (AB022) | 0.002 | |
| | | seq 3 | | |
| DVD3287 | TNF (seq 3) | PGE2 (AB022) | 0.018 | |
| | | seq 3 | | |
| DVD2713 | TNF (seq 1) | NGF | 0.006 | |
| DVD2714 | TNF (seq 1) | NGF | 0.008 | |
| DVD2716 | TNF (seq 1) | NGF | 0.014 | |
| DVD2717 | TNF (seq 1) | NGF | 0.278 | |
| DVD2718 | NGF | TNF (seq 1) | | 0.249 |
| DVD2719 | NGF | TNF (seq 1) | | 0.126 |
| DVD2721 | NGF | TNF (seq 1) | | 0.029 |
| DVD2722 | NGF | TNF (seq 1) | | 0.190 |
| DVD2763 | TNF (seq 2) | NGF | 0.004 | |
| DVD2764 | TNF (seq 2) | NGF | 0.012 | |
| DVD2766 | TNF (seq 2) | NGF | 0.010 | |
| DVD2767 | TNF (seq 2) | NGF | 0.010 | |
| DVD2768 | NGF | TNF (seq 2) | | 0.189 |
| DVD2769 | NGF | TNF (seq 2) | | 0.222 |
| DVD2771 | NGF | TNF (seq 2) | | 0.060 |
| DVD2772 | NGF | TNF (seq 2) | | 0.128 |
| DVD2813 | TNF (seq 3) | NGF | 0.016 | |
| DVD2814 | TNF (seq 3) | NGF | 0.012 | |
| DVD2816 | TNF (seq 3) | NGF | 0.009 | |
| DVD2817 | TNF (seq 3) | NGF | 0.013 | |
| DVD2818 | NGF | TNF (seq 3) | | 0.072 |
| DVD2819 | NGF | TNF (seq 3) | | 0.279 |
| DVD2821 | NGF | TNF (seq 3) | | 0.090 |
| DVD2822 | NGF | TNF (seq 3) | | 0.107 |
| DVD3038 | TNF (seq 4) | NGF | 0.002 | |
| DVD3039 | TNF (seq 4) | NGF | 0.012 | |
| DVD3041 | TNF (seq 4) | NGF | 0.006 | |
| DVD3042 | TNF (seq 4) | NGF | 0.006 | |
| DVD3043 | NGF | TNF (seq 4) | | 0.128 |
| DVD3044 | NGF | TNF (seq 4) | | 0.673 |
| DVD3046 | NGF | TNF (seq 4) | | 0.050 |
| DVD3047 | NGF | TNF (seq 4) | | — |

[0177] All DVD-Ig proteins containing VDs from AB436, AB437, AB441, or AB444 in either the N-terminal or C-terminal position showed neutralization in the L929 huTNFα neutralization assay.

### Example 2.4

### Inhibition of NGF in TF-1 Cell Proliferation Bioassay

[0178] TF-1. are cultured in RPMI 1640 (Invitrogen)+10% Fetal Bovine Serum (Hyclone)+L-glutamine (Invitrogen)+rhu GM-CSF (R&D Systems,) TF-1 cells are serum starved 24 hours in RPMI 1640+L-glutamine at 1×10⁵ cells per mL and incubated overnight at 37° C., 5% CO₂. The day of the experiment TF-1 cells are plated in opaque walled 96-well plates at 2.5×10⁴ cells per well in a 100 μL volume+ assay media (RPMI-1640+L-glutamine+4% FBS) Stimulate the cells by adding NGF/DVD-Ig or antibody to the cells. The DVD-Ig™ and control IgG were diluted to a 4× concentration in assay media and serial 1:5 dilutions were performed. The huNGF was diluted to 8 ng/mL in assay media. The DVD-Ig™ (50 ul) and huNGF (50 uL) solutions were added to the plated for a final concentration of 2 ng/mL huNGF and 25 nM-0.000003 nM DVD-Ig™. The plates were incubated for 72 hour at 37° C., 5% CO₂. To quantitate viability, the Cell Titer Glo kit (Promega cat# TB288) was used (100 ul of solution added to each well following manufacturer's instructions). The plates were read using luminescence on a Spectromax 190 ELISA plate reader.

TABLE 8
NGF Inhibition Assay With NGF Parent Antibodies and DVD-Ig Proteins

| Parent | N-terminal | C-terminal | N-Terminal | C-Terminal VD |
|---|---|---|---|---|
| Antibody | Variable | Variable | VD NGF | NGF |
| or DVD- | Domain | Domain | Neutralization | Neutralization |
| Ig ID | (VD) | (VD) | Assay IC50 nM | Assay IC50 nM |
| AB267 | NGF | | 0.007 | |
| DVD2713 | TNF (seq 1) | NGF | | 2.895 |
| DVD2714 | TNF (seq 1) | NGF | | 6.852 |
| DVD2716 | TNF (seq 1) | NGF | | 0.6242 |
| DVD2717 | TNF (seq 1) | NGF | | 0.936 |
| DVD2718 | NGF | TNF (seq 1) | 0.008 | |
| DVD2719 | NGF | TNF (seq 1) | 0.019 | |
| DVD2721 | NGF | TNF (seq 1) | 0.041 | |
| DVD2722 | NGF | TNF (seq 1) | 0.053 | |
| DVD2763 | TNF (seq 2) | NGF | | 0.871 |
| DVD2764 | TNF (seq 2) | NGF | | 4.097 |
| DVD2766 | TNF (seq 2) | NGF | | |
| DVD2767 | TNF (seq 2) | NGF | | 0.646 |
| DVD2768 | NGF | TNF (seq 2) | 0.003 | |
| DVD2769 | NGF | TNF (seq 2) | 0.001 | |
| DVD2771 | NGF | TNF (seq 2) | 0.037 | |
| DVD2772 | NGF | TNF (seq 2) | 0.04 | |
| DVD2813 | TNF (seq 3) | NGF | | 7.455 |
| DVD2814 | TNF (seq 3) | NGF | | 0.019 |
| DVD2816 | TNF (seq 3) | NGF | | 2.89 |
| DVD2817 | TNF (seq 3) | NGF | | 1.275 |
| DVD2818 | NGF | TNF (seq 3) | 0.003 | |
| DVD2819 | NGF | TNF (seq 3) | 0.006 | |
| DVD2821 | NGF | TNF (seq 3) | 0.011 | |
| DVD2822 | NGF | TNF (seq 3) | 0.003 | |
| DVD3038 | TNF (seq 4) | NGF | | 0.093 |
| DVD3039 | TNF (seq 4) | NGF | | 0.088 |
| DVD3041 | TNF (seq 4) | NGF | | >10 |
| DVD3042 | TNF (seq 4) | NGF | | >10 |
| DVD3043 | NGF | TNF (seq 4) | NA | |
| DVD3044 | NGF | TNF (seq 4) | NA | |
| DVD3046 | NGF | TNF (seq 4) | 0.145 | |
| DVD3047 | NGF | TNF (seq 4) | >10 | |

[0179] All DVD-Ig proteins containing VDs from AB267 in either the N-terminal or C-terminal position showed neutralization in the TF-1 NGF neutralization assay.

### Example 2.5

### Affinity Determination Using BIACORE Technology

TABLE 9
Reagents Used in Biacore Analyses

| Antigen | Vendor Designation | Vendor | Catalog # |
|---|---|---|---|
| TNFα | Recombinant Human TNF- | R&D | 210-TA |
| | α/TNFSF1A | systems | |
| IL-13 | Recombinant Human IL-13 | R&D | 213-IL |
| | | systems | |
| NGF | Recombinant Human β-NGF | R&D | 256-GF |
| | | systems | |

### BIACORE Methods:

[0181] The BIACORE assay (GE, Healthcare Piscataway, N.J.) determined the affinity of antibodies or DVD-Ig with kinetic measurements of on-rate and off-rate constants. Binding of antibodies or DVD-Ig proteins to a target antigen (for example, a purified recombinant target antigen) was determined by surface plasmon resonance-based measurements with a Biacore T200 using running HBS-EP+buffer from GE Healthcare at 25° C. All chemicals were obtained from GE Healthcare or otherwise from a different source as described in the text. For example, approximately 5000 RU of goat anti-mouse IgG, (Fcγ), fragment specific polyclonal antibody (Pierce Biotechnology Inc, Rockford, Ill.) diluted in 10 mM sodium acetate (pH 4.5) was directly immobilized across a CM5 research grade biosensor chip using a standard amine coupling kit according to manufacturer's instructions. Unreacted moieties on the biosensor surface were blocked with ethanolamine. Modified carboxymethyl dextran surface in flowcell 1 was used as a reference surface. Rate constants were derived by making kinetic binding measurements at different antigen concentrations ranging from 0.8-100 nM. Binding was recorded as a function of time and kinetic rate constants were calculated. In this assay, association rate was evaluated for 5 min and dissociation was monitored for 10 min. For kinetic screening analysis, rate equations derived from the 1:1 binding model were fitted simultaneously to association and dissociation phases of all injections (using global fit analysis with Rmax fit locally to account for capture variations) with the use of Biaevaluation software. Purified antibodies or DVD-Ig proteins were diluted in HEPES-buffered saline for capture across goat anti-mouse IgG specific reaction surfaces. Antibodies or DVD-Ig proteins to be captured as a ligand were injected over reaction matrices at a flow rate of 5 μl/minute. The association and dissociation rate constants, kₒₙ (M⁻¹ s⁻¹) and k_{off} (s⁻¹) were determined under a continuous flow rate of 50 μl/minute. Rate constants were derived by making kinetic binding measurements at different antigen concentrations ranging from 0.8-100 nM. Binding was recorded as a function of time and kinetic rate constants were calculated. In this assay, association rate was evaluated for 5 min and dissociation was monitored for 10 min.

TABLE 10
BIACORE Analysis of Parental Antibodies and DVD-Ig Proteins

| Parent | N-terminal | C-terminal | | | |
|---|---|---|---|---|---|
| Antibody or | Variable | Variable | kₒₙ | k_{off} | k_{D} |
| DVD-Ig ID | Domain (VD) | Domain (VD) | (M − 1s − 1) | (s − 1) | (M) |
| AB436 | TNF (seq 1) | | 1.10E+07 | 7.90E−05 | 7.10E−12 |
| AB437 | TNF (seq 2) | | 1.20E+07 | 1.00E−04 | 8.60E−12 |
| AB441 | TNF (seq 3) | | 7.50E+06 | 1.80E−05 | 2.40E−12 |
| AB444 | TNF (seq 4) | | 1.10E+07 | 5.50E−05 | 4.80E−12 |
| AB397 | IL-13 (seq 1) | | 9.20E+05 | 1.20E−04 | 1.30E−10 |
| AB398 | IL-13 (seq 2) | | 6.30E+05 | 2.80E−05 | 4.50E−11 |
| AB399 | IL-13 (seq 3) | | 3.40E+06 | 6.40E−05 | 1.90E−11 |
| DVD2683 | TNF (seq 1) | | 1.50E+07 | 9.00E−05 | 5.80E−12 |
| DVD2683 | | IL-13 (seq 1) | 6.80E+04 | 5.90E−05 | 8.70E−10 |
| DVD2684 | TNF (seq 1) | | 1.40E+07 | 9.10E−05 | 6.60E−12 |
| DVD2684 | | IL-13 (seq 1) | 4.80E+04 | 5.90E−05 | 1.20E−09 |
| DVD2686 | TNF (seq 1) | | 1.50E+07 | 4.80E−05 | 3.10E−12 |
| DVD2686 | | IL-13 (seq 1) | 1.40E+05 | 4.40E−05 | 3.20E−10 |
| DVD2687 | TNF (seq 1) | | 1.80E+07 | 7.10E−05 | 4.00E−12 |
| DVD2687 | | IL-13 (seq 1) | 1.10E+05 | 5.00E−05 | 4.70E−10 |
| DVD2691 | IL-13 (seq 1) | | 9.50E+05 | 1.30E−04 | 1.30E−10 |
| DVD2691 | | TNF (seq 1) | 2.00E+06 | 5.00E−05 | 2.50E−11 |
| DVD2733 | TNF (seq 2) | | 1.60E+07 | 9.00E−05 | 5.60E−12 |
| DVD2733 | | IL-13 (seq 1) | 7.90E+04 | 8.60E−05 | 1.10E−09 |
| DVD2734 | TNF (seq 2) | | 1.50E+07 | 1.40E−04 | 9.60E−12 |
| DVD2734 | | IL-13 (seq 1) | 5.80E+04 | 4.80E−05 | 8.20E−10 |
| DVD2736 | TNF (seq 2) | | 1.80E+07 | 6.40E−05 | 3.70E−12 |
| DVD2736 | | IL-13 (seq 1) | 1.50E+05 | 4.60E−05 | 3.00E−10 |
| DVD2737 | TNF (seq 2) | | 1.70E+07 | 5.80E−05 | 3.40E−12 |
| DVD2737 | | IL-13 (seq 1) | 1.20E+05 | 6.20E−05 | 5.00E−10 |
| DVD3008 | TNF (seq 4) | | 1.60E+07 | 1.20E−04 | 7.10E−12 |
| DVD3008 | | IL-13 (seq 1) | 1.10E+05 | 1.50E−05 | 1.40E−10 |
| DVD3009 | TNF (seq 4) | | 1.50E+07 | 5.70E−05 | 3.90E−12 |
| DVD3009 | | IL-13 (seq 1) | 8.70E+04 | 3.20E−05 | 3.60E−10 |
| DVD3083 | TNF (seq 1) | | 1.70E+07 | 6.80E−05 | 3.90E−12 |
| DVD3083 | | IL-13 (seq 2) | 5.20E+04 | 2.00E−06 | 3.80E−11 |
| DVD3084 | TNF (seq 1) | | 1.50E+07 | 1.30E−04 | 8.60E−12 |
| DVD3084 | | IL-13 (seq 2) | 8.70E+04 | 1.10E−06 | 1.20E−11 |
| DVD3086 | TNF (seq 1) | | 1.70E+07 | 8.50E−05 | 5.00E−12 |
| DVD3086 | | IL-13 (seq 2) | 6.50E+04 | <1E−06 | <1.5E−11 |
| DVD3087 | TNF (seq 1) | | 1.70E+07 | 6.20E−05 | 3.70E−12 |
| DVD3087 | | IL-13 (seq 2) | 5.10E+04 | <1E−06 | <2.0E−11 |
| DVD3092 | IL-13 (seq 2) | | 5.80E+05 | 2.50E−05 | 4.40E−11 |
| DVD3092 | | TNF (seq 1) | 1.80E+06 | 1.10E−04 | 5.80E−11 |
| DVD3093 | TNF (seq 2) | | 1.90E+07 | 9.70E−05 | 5.20E−12 |
| DVD3093 | | IL-13 (seq 2) | 5.10E+04 | <1E−06 | <2.0E−11 |
| DVD3094 | TNF (seq 2) | | 7.40E+06 | 1.20E−04 | 1.60E−11 |
| DVD3094 | | IL-13 (seq 2) | 8.90E+04 | 5.90E−06 | 6.70E−11 |
| DVD3096 | TNF (seq 2) | | 1.90E+07 | 1.40E−04 | 7.20E−12 |
| DVD3096 | | IL-13 (seq 2) | 7.00E+04 | 5.30E−08 | 7.60E−13 |
| DVD3097 | TNF (seq 2) | | 2.00E+07 | 8.60E−05 | 4.30E−12 |
| DVD3097 | | IL-13 (seq 2) | 4.80E+04 | <1E−06 | <2.1E−11 |
| DVD3106 | TNF (seq 3) | | 3.90E+06 | 8.50E−05 | 2.20E−11 |
| DVD3106 | | IL-13 (seq 2) | 5.70E+05 | 6.40E−05 | 1.10E−10 |
| DVD3107 | TNF (seq 3) | | 2.80E+06 | 1.50E−04 | 5.30E−11 |
| DVD3107 | | IL-13 (seq 2) | 8.10E+05 | 7.00E−05 | 8.70E−11 |
| DVD3113 | TNF (seq 4) | | 1.80E+07 | 2.70E−05 | 1.50E−12 |
| DVD3113 | | IL-13 (seq 2) | 7.50E+04 | 1.20E−06 | 1.50E−11 |
| DVD3114 | TNF (seq 4) | | 1.50E+07 | 6.90E−05 | 4.70E−12 |
| DVD3114 | | IL-13 (seq 2) | 1.70E+05 | 1.20E−06 | 6.90E−12 |
| DVD3116 | TNF (seq 4) | | 1.40E+07 | 5.00E−05 | 3.60E−12 |
| DVD3116 | | IL-13 (seq 2) | 5.80E+04 | <1E−06 | <1.7E−11 |
| DVD3143 | TNF (seq 1) | | 1.50E+07 | 5.40E−05 | 3.50E−12 |
| DVD3143 | | IL-13 (seq 3) | 1.70E+05 | 6.20E−05 | 3.70E−10 |
| DVD3144 | TNF (seq 1) | | 1.30E+07 | 8.60E−05 | 6.50E−12 |
| DVD3144 | | IL-13 (seq 3) | 6.20E+04 | 7.30E−06 | 1.20E−10 |
| DVD3146 | TNF (seq 1) | | 1.40E+07 | 8.20E−05 | 6.00E−12 |
| DVD3146 | | IL-13 (seq 3) | 1.90E+05 | 4.60E−05 | 2.40E−10 |
| DVD3147 | TNF (seq 1) | | 1.30E+07 | 9.50E−05 | 7.40E−12 |
| DVD3147 | | IL-13 (seq 3) | 1.30E+05 | <1E−06 | <7.7E−12 |
| DVD3153 | TNF (seq 2) | | 1.50E+07 | 8.30E−05 | 5.40E−12 |
| DVD3153 | | IL-13 (seq 3) | 1.80E+05 | 8.20E−05 | 4.50E−10 |
| DVD3154 | TNF (seq 2) | | 1.40E+07 | 1.30E−04 | 9.40E−12 |
| DVD3154 | | IL-13 (seq 3) | 5.30E+04 | 3.00E−05 | 5.80E−10 |
| DVD3156 | TNF (seq 2) | | 1.70E+07 | 5.20E−05 | 3.10E−12 |
| DVD3156 | | IL-13 (seq 3) | 1.60E+05 | 5.40E−05 | 3.40E−10 |
| DVD3157 | TNF (seq 2) | | 1.10E+07 | 5.00E−05 | 4.70E−12 |
| DVD3157 | | IL-13 (seq 3) | 1.10E+05 | 1.10E−06 | 9.50E−12 |
| DVD3158 | IL-13 (seq 3) | | 1.20E+06 | 6.70E−05 | 5.70E−11 |
| DVD3158 | | TNF (seq 2) | 1.30E+06 | 6.30E−05 | 4.70E−11 |
| DVD3159 | IL-13 (seq 3) | | 1.40E+06 | 5.40E−05 | 3.90E−11 |
| DVD3159 | | TNF (seq 2) | 1.20E+06 | 2.80E−05 | 2.30E−11 |
| DVD3161 | IL-13 (seq 3) | TNF (seq 2) | | | |
| DVD3163 | TNF (seq 3) | | 1.30E+07 | 5.00E−05 | 3.90E−12 |
| DVD3163 | | IL-13 (seq 3) | 1.40E+05 | 8.40E−05 | 6.10E−10 |
| DVD3164 | TNF (seq 3) | | 4.00E+06 | 6.50E−05 | 1.60E−11 |
| DVD3164 | | IL-13 (seq 3) | 5.50E+04 | 4.80E−05 | 8.70E−10 |
| DVD3166 | TNF (seq 3) | | 4.70E+06 | 1.30E−04 | 2.70E−11 |
| DVD3166 | | IL-13 (seq 3) | 2.80E+05 | 5.10E−05 | 1.80E−10 |
| DVD3168 | IL-13 (seq 3) | | 1.10E+06 | 7.40E−05 | 6.40E−11 |
| DVD3168 | | TNF (seq 3) | 8.00E+05 | 3.60E−05 | 4.50E−11 |
| DVD3169 | IL-13 (seq 3) | | 1.90E+06 | 2.00E−05 | 1.00E−11 |
| DVD3169 | | TNF (seq 3) | 6.50E+05 | <1E−06 | <1.5E−12 |
| DVD3173 | TNF (seq 4) | | 7.00E+06 | 2.20E−05 | 3.20E−12 |
| DVD3173 | | IL-13 (seq 3) | 2.40E+05 | 8.80E−05 | 3.70E−10 |
| DVD3174 | TNF (seq 4) | | 4.40E+06 | 1.40E−05 | 3.30E−12 |
| DVD3174 | | IL-13 (seq 3) | 8.50E+04 | 7.70E−05 | 9.00E−10 |
| DVD3176 | TNF (seq 4) | | 5.30E+06 | 1.30E−06 | 2.50E−13 |
| DVD3176 | | IL-13 (seq 3) | 5.50E+05 | 4.80E−05 | 8.70E−11 |

[0182] Binding of all DVD-Ig proteins characterized by Biacore technology was maintained and comparable to that of parent antibodies. All variable domains bound with similar high affinity as the parent antibodies.

### Example 3

### Characterization of Antibodies and DVD-Ig Proteins

[0183] The ability of purified DVD-Ig protein to inhibit a functional activity was determined, e.g., using the cytokine bioassay as described in Example 1. The binding affinities of the DVD-Ig protein to recombinant human antigen were determined using surface plasmon resonance (Biacore®) measurement as described in Example 2. The IC₅₀ values from the bioassays and the affinity of the antibodies and DVD-Ig proteins were ranked. The DVD-Ig protein that fully maintain the activity of the parent mAbs were selected as candidates for future development. The top 2-3 most favorable DVD-Ig proteins were further characterized.

### Example 3.1

### Pharmacokinetic Analysis of Humanized Antibodies or DVD-Ig Protein

[0184] Pharmacokinetic studies are carried out in Sprague-Dawley rats and cynomolgus monkeys. Male and female rats and cynomolgus monkeys are dosed intravenously or subcutaneously with a single dose of 4 mg/kg mAb or DVD-Ig protein and samples are analyzed using antigen capture ELISA, and pharmacokinetic parameters are determined by noncompartmental analysis. Briefly, ELISA plates are coated with goat anti-biotin antibody (5 mg/ml, 4° C., overnight), blocked with Superblock (Pierce), and incubated with biotinylated human antigen at 50 ng/ml in 10% Superblock TTBS at room temperature for 2 hours. Serum samples are serially diluted (0.5% serum, 10% Superblock in TTBS) and incubated on the plate for 30 minutes at room temperature. Detection is carried out with HRP-labeled goat anti human antibody and concentrations are determined with the help of standard curves using the four parameter logistic fit. Values for the pharmacokinetic parameters are determined by non-compartmental model using WinNonlin software (Pharsight Corporation, Mountain View, Calif.). Humanized mAbs with good pharmacokinetics profile (T1/2 is 8-13 days or better, with low clearance and excellent bioavailability 50-100%) are selected.

### Example 3.2

### Physicochemical and In Vitro Stability Analysis of Humanized Monoclonal Antibodies and DVD-Ig Proteins

### Size Exclusion Chromatography

[0185] Antibodies or DVD-Ig proteins were diluted to 2.5 mg/mL with water and 20 mL was analyzed on a Shimadzu HPLC system using a TSK gel G3000 SWXL column (Tosoh Bioscience, cat# k5539-05k). Samples were eluted from the column with 211 mM sodium sulfate, 92 mM sodium phosphate, pH 7.0, at a flow rate of 0.3 mL/minutes. The HPLC system operating conditions were as follows:
[0186] Mobile phase: 211 mM Na₂SO₄, 92 mM Na₂HPO₄*7H₂O, pH 7.0
[0187] Gradient: Isocratic
[0188] Flow rate: 0.3 mL/minute
[0189] Detector wavelength: 280 nm
[0190] Autosampler cooler temp: 4° C.
[0191] Column oven temperature: Ambient
[0192] Run time: 50 minutes

[0193] Table 11 contains purity data of parent antibodies and DVD-Ig proteins expressed as percent monomer (unaggregated protein of the expected molecular weight) as determined by the above protocol.

TABLE 11
Purity of Parent Antibodies and DVD-Ig Proteins as Determined by Size
Exclusion Chromatography

| Parent | N-terminal | C-terminal | % |
|---|---|---|---|
| Antibody or | Variable Domain | Variable Domain | Monomer |
| DVD-Ig ID | (VD) | (VD) | (purity) |
| AB436 | TNF (seq 1) | | 85.7 |
| AB437 | TNF (seq 2) | | 86.9 |
| AB441 | TNF (seq 3) | | 82.7 |
| AB444 | TNF (seq 4) | | 75.3 |
| AB397 | IL-13 (seq 1) | | 93 |
| AB398 | IL-13 (seq 2) | | 92.8 |
| AB399 | IL-13 (seq 3) | | 98.8 |
| DVD2683 | TNF (seq 1) | IL-13 (seq 1) | 89.4 |
| DVD2684 | TNF (seq 1) | IL-13 (seq 1) | 91.6 |
| DVD2686 | TNF (seq 1) | IL-13 (seq 1) | 96.2 |
| DVD2687 | TNF (seq 1) | IL-13 (seq 1) | 88.9 |
| DVD2688 | IL-13 (seq 1) | TNF (seq 1) | 76 |
| DVD2689 | IL-13 (seq 1) | TNF (seq 1) | 77.7 |
| DVD2691 | IL-13 (seq 1) | TNF (seq 1) | 80.2 |
| DVD2692 | IL-13 (seq 1) | TNF (seq 1) | 72.7 |
| DVD2733 | TNF (seq 2) | IL-13 (seq 1) | 97.3 |
| DVD2734 | TNF (seq 2) | IL-13 (seq 1) | 86.4 |
| DVD2736 | TNF (seq 2) | IL-13 (seq 1) | 91.1 |
| DVD2737 | TNF (seq 2) | IL-13 (seq 1) | 85 |
| DVD2738 | IL-13 (seq 1) | TNF (seq 2) | 53.7 |
| DVD2739 | IL-13 (seq 1) | TNF (seq 2) | 55.2 |
| DVD2741 | IL-13 (seq 1) | TNF (seq 2) | 54.8 |
| DVD2742 | IL-13 (seq 1) | TNF (seq 2) | 48.9 |
| DVD2783 | TNF (seq 3) | IL-13 (seq 1) | 79.2 |
| DVD2784 | TNF (seq 3) | IL-13 (seq 1) | 76.6 |
| DVD2786 | TNF (seq 3) | IL-13 (seq 1) | 77.9 |
| DVD2787 | TNF (seq 3) | IL-13 (seq 1) | 74.8 |
| DVD2788 | IL-13 (seq 1) | TNF (seq 3) | 56.5 |
| DVD2789 | IL-13 (seq 1) | TNF (seq 3) | 59.6 |
| DVD2791 | IL-13 (seq 1) | TNF (seq 3) | 61 |
| DVD2792 | IL-13 (seq 1) | TNF (seq 3) | 61 |
| DVD3008 | TNF (seq 4) | IL-13 (seq 1) | 84.9 |
| DVD3009 | TNF (seq 4) | IL-13 (seq 1) | 79.9 |
| DVD3011 | TNF (seq 4) | IL-13 (seq 1) | 77.2 |
| DVD3012 | TNF (seq 4) | IL-13 (seq 1) | 75.2 |
| DVD3013 | IL-13 (seq 1) | TNF (seq 4) | 49.1 |
| DVD3014 | IL-13 (seq 1) | TNF (seq 4) | 68.9 |
| DVD3016 | IL-13 (seq 1) | TNF (seq 4) | 69.4 |
| DVD3017 | IL-13 (seq 1) | TNF (seq 4) | 72.1 |
| DVD3083 | TNF (seq 1) | IL-13 (seq 2) | 91.7 |
| DVD3084 | TNF (seq 1) | IL-13 (seq 2) | 97.8 |
| DVD3086 | TNF (seq 1) | IL-13 (seq 2) | 95.8 |
| DVD3087 | TNF (seq 1) | IL-13 (seq 2) | 94.3 |
| DVD3088 | IL-13 (seq 2) | TNF (seq 1) | 67 |
| DVD3089 | IL-13 (seq 2) | TNF (seq 1) | 79.5 |
| DVD3091 | IL-13 (seq 2) | TNF (seq 1) | 76.3 |
| DVD3092 | IL-13 (seq 2) | TNF (seq 1) | 86.6 |
| DVD3093 | TNF (seq 2) | IL-13 (seq 2) | 93.4 |
| DVD3094 | TNF (seq 2) | IL-13 (seq 2) | 93.5 |
| DVD3096 | TNF (seq 2) | IL-13 (seq 2) | 97.5 |
| DVD3097 | TNF (seq 2) | IL-13 (seq 2) | 93 |
| DVD3098 | IL-13 (seq 2) | TNF (seq 2) | 76.4 |
| DVD3099 | IL-13 (seq 2) | TNF (seq 2) | 59.8 |
| DVD3101 | IL-13 (seq 2) | TNF (seq 2) | 57.4 |
| DVD3102 | IL-13 (seq 2) | TNF (seq 2) | 59.6 |
| DVD3103 | TNF (seq 3) | IL-13 (seq 2) | 75 |
| DVD3104 | TNF (seq 3) | IL-13 (seq 2) | 78.3 |
| DVD3106 | TNF (seq 3) | IL-13 (seq 2) | 81.9 |
| DVD3107 | TNF (seq 3) | IL-13 (seq 2) | 80.1 |
| DVD3108 | IL-13 (seq 2) | TNF (seq 3) | 53.7 |
| DVD3109 | IL-13 (seq 2) | TNF (seq 3) | 56.3 |
| DVD3111 | IL-13 (seq 2) | TNF (seq 3) | 76.6 |
| DVD3112 | IL-13 (seq 2) | TNF (seq 3) | 58.1 |
| DVD3113 | TNF (seq 4) | IL-13 (seq 2) | 84.8 |
| DVD3114 | TNF (seq 4) | IL-13 (seq 2) | 90.9 |
| DVD3116 | TNF (seq 4) | IL-13 (seq 2) | 91.3 |
| DVD3118 | IL-13 (seq 2) | TNF (seq 4) | 66.4 |
| DVD3119 | IL-13 (seq 2) | TNF (seq 4) | 65.1 |
| DVD3121 | IL-13 (seq 2) | TNF (seq 4) | 73.5 |
| DVD3122 | IL-13 (seq 2) | TNF (seq 4) | 68.9 |
| DVD3143 | TNF (seq 1) | IL-13 (seq 3) | 96.3 |
| DVD3144 | TNF (seq 1) | IL-13 (seq 3) | 97.3 |
| DVD3146 | TNF (seq 1) | IL-13 (seq 3) | 99.4 |
| DVD3147 | TNF (seq 1) | IL-13 (seq 3) | 87.5 |
| DVD3153 | TNF (seq 2) | IL-13 (seq 3) | 97.90 |
| DVD3154 | TNF (seq 2) | IL-13 (seq 3) | 98.00 |
| DVD3156 | TNF (seq 2) | IL-13 (seq 3) | 98.40 |
| DVD3157 | TNF (seq 2) | IL-13 (seq 3) | 90.50 |
| DVD3158 | IL-13 (seq 3) | TNF (seq 2) | 100 |
| DVD3163 | TNF (seq 3) | IL-13 (seq 3) | 93.7 |
| DVD3164 | TNF (seq 3) | IL-13 (seq 3) | 94.6 |
| DVD3166 | TNF (seq 3) | IL-13 (seq 3) | 88.7 |
| DVD3167 | TNF (seq 3) | IL-13 (seq 3) | 76 |
| DVD3168 | IL-13 (seq 3) | TNF (seq 3) | 100 |
| DVD3169 | IL-13 (seq 3) | TNF (seq 3) | 70 |
| DVD3173 | TNF (seq 4) | IL-13 (seq 3) | 86.9 |
| DVD3174 | TNF (seq 4) | IL-13 (seq 3) | 88 |
| DVD3176 | TNF (seq 4) | IL-13 (seq 3) | 88.2 |
| DVD3177 | TNF (seq 4) | IL-13 (seq 3) | 65.9 |
| AB048 | PGE2 (seq 1) | | |
| AB131 | PGE2 (AB016) seq 2 | | 100 |
| AB135 | PGE2 (AB022) seq 3 | | 100 |
| DVD2693 | TNF (seq 1) | PGE2 (seq 1) | 92.2 |
| DVD2694 | TNF (seq 1) | PGE2 (seq 1) | 94.3 |
| DVD2696 | TNF (seq 1) | PGE2 (seq 1) | 98.2 |
| DVD2697 | TNF (seq 1) | PGE2 (seq 1) | 96.4 |
| DVD2698 | PGE2 (seq 1) | TNF (seq 1) | 97.3 |
| DVD2699 | PGE2 (seq 1) | TNF (seq 1) | 96.4 |
| DVD2701 | PGE2 (seq 1) | TNF (seq 1) | 96.3 |
| DVD2702 | PGE2 (seq 1) | TNF (seq 1) | 94.1 |
| DVD2743 | TNF (seq 2) | PGE2 (seq 1) | 96.7 |
| DVD2744 | TNF (seq 2) | PGE2 (seq 1) | 98 |
| DVD2746 | TNF (seq 2) | PGE2 (seq 1) | 100 |
| DVD2747 | TNF (seq 2) | PGE2 (seq 1) | 98.6 |
| DVD2748 | PGE2 (seq 1) | TNF (seq 2) | 98 |
| DVD2749 | PGE2 (seq 1) | TNF (seq 2) | 97.3 |
| DVD2751 | PGE2 (seq 1) | TNF (seq 2) | 97.6 |
| DVD2752 | PGE2 (seq 1) | TNF (seq 2) | 98.5 |
| DVD2793 | TNF (seq 3) | PGE2 (seq 1) | 75.4 |
| DVD2794 | TNF (seq 3) | PGE2 (seq 1) | 64.5 |
| DVD2796 | TNF (seq 3) | PGE2 (seq 1) | 75.5 |
| DVD2797 | TNF (seq 3) | PGE2 (seq 1) | 98.6 |
| DVD2798 | PGE2 (seq 1) | TNF (seq 3) | 98 |
| DVD2799 | PGE2 (seq 1) | TNF (seq 3) | 97.3 |
| DVD2801 | PGE2 (seq 1) | TNF (seq 3) | 97.6 |
| DVD2802 | PGE2 (seq 1) | TNF (seq 3) | 98.5 |
| DVD3018 | TNF (seq 4) | PGE2 | 75.4 |
| DVD3019 | TNF (seq 4) | PGE2 | 64.5 |
| DVD3021 | TNF (seq 4) | PGE2 | 75.5 |
| DVD3022 | TNF (seq 4) | PGE2 | 76.7 |
| DVD3023 | PGE2 | TNF (seq 4) | 98.1 |
| DVD3024 | PGE2 | TNF (seq 4) | 97 |
| DVD3026 | PGE2 | TNF (seq 4) | 98.6 |
| DVD3027 | PGE2 | TNF (seq 4) | 98.9 |
| DVD3203 | TNF (seq 1) | PGE2 (AB016) seq 2 | 86.1 |
| DVD3204 | TNF (seq 1) | PGE2 (AB016) seq 2 | 95.2 |
| DVD3206 | TNF (seq 1) | PGE2 (AB016) seq 2 | 84.9 |
| DVD3207 | TNF (seq 1) | PGE2 (AB016) seq 2 | 86.2 |
| DVD3208 | PGE2 (AB016) seq 2 | TNF (seq 1) | 95.6 |
| DVD3209 | PGE2 (AB016) seq 2 | TNF (seq 1) | 95.4 |
| DVD3211 | PGE2 (AB016) seq 2 | TNF (seq 1) | 87.3 |
| DVD3212 | PGE2 (AB016) seq 2 | TNF (seq 1) | 90.8 |
| DVD3213 | TNF (seq 2) | PGE2 (AB016) seq 2 | 95.3 |
| DVD3214 | TNF (seq 2) | PGE2 (AB016) seq 2 | 97.6 |
| DVD3216 | TNF (seq 2) | PGE2 (AB016) seq 2 | 91.4 |
| DVD3217 | TNF (seq 2) | PGE2 (AB016) seq 2 | 93.9 |
| DVD3218 | PGE2 (AB016) seq 2 | TNF (seq 2) | 96.9 |
| DVD3219 | PGE2 (AB016) seq 2 | TNF (seq 2) | 97.3 |
| DVD3221 | PGE2 (AB016) seq 2 | TNF (seq 2) | 91.4 |
| DVD3222 | PGE2 (AB016) seq 2 | TNF (seq 2) | 93.9 |
| DVD3223 | TNF (seq 3) | PGE2 (AB016) seq 2 | 75.8 |
| DVD3224 | TNF (seq 3) | PGE2 (AB016) seq 2 | 88.7 |
| DVD3226 | TNF (seq 3) | PGE2 (AB016) seq 2 | 80.9 |
| DVD3227 | TNF (seq 3) | PGE2 (AB016) seq 2 | 78.8 |
| DVD3228 | PGE2 (AB016) seq 2 | TNF (seq 3) | 93.4 |
| DVD3229 | PGE2 (AB016) seq 2 | TNF (seq 3) | 93.5 |
| DVD3231 | PGE2 (AB016) seq 2 | TNF (seq 3) | 83.8 |
| DVD3232 | PGE2 (AB016) seq 2 | TNF (seq 3) | 93.6 |
| DVD3233 | TNF (seq 4) | PGE2 (AB016) seq 2 | 73.1 |
| DVD3234 | TNF (seq 4) | PGE2 (AB016) seq 2 | 74.6 |
| DVD3236 | TNF (seq 4) | PGE2 (AB016) seq 2 | 67.5 |
| DVD3237 | TNF (seq 4) | PGE2 (AB016) seq 2 | 70.8 |
| DVD3238 | PGE2 (AB016) seq 2 | TNF (seq 4) | 92.3 |
| DVD3239 | PGE2 (AB016) seq 2 | TNF (seq 4) | 95.5 |
| DVD3241 | PGE2 (AB016) seq 2 | TNF (seq 4) | 91.7 |
| DVD3242 | PGE2 (AB016) seq 2 | TNF (seq 4) | 96.6 |
| DVD3263 | TNF (seq 1) | PGE2 (AB022) seq 3 | 82.8 |
| DVD3264 | TNF (seq 1) | PGE2 (AB022) seq 3 | |
| DVD3267 | TNF (seq 1) | PGE2 (AB022) seq 3 | |
| DVD3273 | TNF (seq 2) | PGE2 (AB022) seq 3 | 100 |
| DVD3274 | TNF (seq 2) | PGE2 (AB022) seq 3 | 100 |
| DVD3276 | TNF (seq 2) | PGE2 (AB022) seq 3 | 100 |
| DVD3277 | TNF (seq 2) | PGE2 (AB022) seq 3 | |
| DVD3279 | PGE2 (AB022) seq 3 | TNF (seq 2) | |
| DVD3283 | TNF (seq 3) | PGE2 (AB022) seq 3 | 83.4 |
| DVD3284 | TNF (seq 3) | PGE2 (AB022) seq 3 | 91.4 |
| DVD3286 | TNF (seq 3) | PGE2 (AB022) seq 3 | |
| DVD3287 | TNF (seq 3) | PGE2 (AB022) seq 3 | |
| DVD2713 | TNF (seq 1) | NGF | 96.7 |
| DVD2714 | TNF (seq 1) | NGF | 92.4 |
| DVD2716 | TNF (seq 1) | NGF | 93.1 |
| DVD2717 | TNF (seq 1) | NGF | 84 |
| DVD2718 | NGF | TNF (seq 1) | 70.5 |
| DVD2719 | NGF | TNF (seq 1) | 68.2 |
| DVD2721 | NGF | TNF (seq 1) | 72.6 |
| DVD2722 | NGF | TNF (seq 1) | 72 |
| DVD2763 | TNF (seq 2) | NGF | 88.6 |
| DVD2764 | TNF (seq 2) | NGF | 85.9 |
| DVD2766 | TNF (seq 2) | NGF | 87.9 |
| DVD2767 | TNF (seq 2) | NGF | 85.50 |
| DVD2768 | NGF | TNF (seq 2) | 75.40 |
| DVD2769 | NGF | TNF (seq 2) | 73.60 |
| DVD2771 | NGF | TNF (seq 2) | 76.20 |
| DVD2772 | NGF | TNF (seq 2) | 72.60 |
| DVD2813 | TNF (seq 3) | NGF | 80.30 |
| DVD2814 | TNF (seq 3) | NGF | 76.20 |
| DVD2816 | TNF (seq 3) | NGF | 82.90 |
| DVD2817 | TNF (seq 3) | NGF | 78.3 |
| DVD2818 | NGF | TNF (seq 3) | 75 |
| DVD2819 | NGF | TNF (seq 3) | 74.9 |
| DVD2821 | NGF | TNF (seq 3) | 76.1 |
| DVD2822 | NGF | TNF (seq 3) | 78.7 |
| DVD3038 | TNF (seq 4) | NGF | 81.6 |
| DVD3039 | TNF (seq 4) | NGF | 74.2 |
| DVD3041 | TNF (seq 4) | NGF | 69.4 |
| DVD3042 | TNF (seq 4) | NGF | 66.2 |
| DVD3043 | NGF | TNF (seq 4) | 73.8 |
| DVD3044 | NGF | TNF (seq 4) | 69.9 |
| DVD3046 | NGF | TNF (seq 4) | 72.5 |
| DVD3047 | NGF | TNF (seq 4) | 72.6 |

[0194] DVD-Ig proteins showed an excellent SEC profile with most DVD-Ig proteins showing >90% monomer. This DVD-Ig protein profile was similar to that observed for parent antibodies.

### SDS-PAGE

[0195] Antibodies and DVD-Ig proteins are analyzed by sodium dodecyl sulfate-polyacrylamide gel electrophoresis (SDS-PAGE) under both reducing and non-reducing conditions. Adalimumab lot AFP04C is used as a control. For reducing conditions, the samples are mixed 1:1 with 2× tris glycine SDS-PAGE sample buffer (Invitrogen, cat# LC2676, lot#1323208) with 100 mM DTT, and heated at 60° C. for 30 minutes. For non-reducing conditions, the samples are mixed 1:1 with sample buffer and heated at 100° C. for 5 minutes. The reduced samples (10 mg per lane) are loaded on a 12% pre-cast tris-glycine gel (Invitrogen, cat# EC6005box, lot#6111021), and the non-reduced samples (10 mg per lane) are loaded on an 8%-16% pre-cast tris-glycine gel (Invitrogen, cat# EC6045box, lot#6111021). SeeBlue Plus 2 (Invitrogen, cat#LC5925, lot#1351542) is used as a molecular weight marker. The gels are run in a XCell SureLock mini cell gel box (Invitrogen, cat# E10001) and the proteins are separated by first applying a voltage of 75 to stack the samples in the gel, followed by a constant voltage of 125 until the dye front reached the bottom of the gel. The running buffer used is 1× tris glycine SDS buffer, prepared from a 10× tris glycine SDS buffer (ABC, MPS-79-080106)). The gels are stained overnight with colloidal blue stain (Invitrogen cat#46-7015, 46-7016) and destained with Milli-Q water until the background is clear. The stained gels are then scanned using an Epson Expression scanner (model 1680, S/N DASX003641).

### Sedimentation Velocity Analysis

[0196] Antibodies or DVD-Ig proteins are loaded into the sample chamber of each of three standard two-sector carbon epon centerpieces. These centerpieces have a 1.2 cm optical path length and are built with sapphire windows. PBS is used for a reference buffer and each chamber contained 140 μL. All samples are examined simultaneously using a 4-hole (AN-60Ti) rotor in a Beckman ProteomeLab XL-1 analytical ultracentrifuge (serial # PL106C01).

[0197] Run conditions are programmed and centrifuge control is performed using ProteomeLab (v5.6). The samples and rotor are allowed to thermally equilibrate for one hour prior to analysis (20.0±0.1° C.). Confirmation of proper cell loading is performed at 3000 rpm and a single scan is recorded for each cell. The sedimentation velocity conditions are the following:

[0198] Sample Cell Volume: 420 mL

[0199] Reference Cell Volume: 420 mL

[0200] Temperature: 20° C.

[0201] Rotor Speed: 35,000 rpm

[0202] Time: 8:00 hours

[0203] UV Wavelength: 280 nm

[0204] Radial Step Size: 0.003 cm

[0205] Data Collection: One data point per step without signal averaging.

[0206] Total Number of Scans: 100

### LC-MS Molecular Weight Measurement of Intact Antibodies

[0207] Molecular weight of intact antibodies and DVD-Ig proteins are analyzed by LC-MS. Each antibody or DVD-Ig protein is diluted to approximately 1 mg/mL with water. An 1100 HPLC (Agilent) system with a protein microtrap (Michrom Bioresources, Inc, cat#004/25109/03) is used to desalt and introduce 5 mg of the sample into an API Qstar pulsar i mass spectrometer (Applied Biosystems). A short gradient is used to elute the samples. The gradient is run with mobile phase A (0.08% FA, 0.02% TFA in HPLC water) and mobile phase B (0.08% FA and 0.02% TFA in acetonitrile) at a flow rate of 50 mL/minute. The mass spectrometer is operated at 4.5 kvolts spray voltage with a scan range from 2000 to 3500 mass to charge ratio.

### LC-MS Molecular Weight Measurement of Antibody and DVD-Ig Protein Light and Heavy Chains

[0208] Molecular weight measurement of antibody and DVD-Ig protein light chain (LC), heavy chain (HC) and deglycosylated HC are analyzed by LC-MS. Antibodies and DVD-Ig proteins are diluted to 1 mg/mL with water and the sample is reduced to LC and HC with a final concentration of 10 mM DTT for 30 minutes at 37° C. To deglycosylate the antibodies and DVD-Ig proteins, 100 mg of the antibody or DVD-Ig protein is incubated with 2 mL of PNGase F, 5 mL of 10% N-octylglucoside in a total volume of 100 mL overnight at 37° C. After deglycosylation the sample is reduced with a final concentration of 10 mM DTT for 30 minutes at 37° C. An Agilent 1100 HPLC system with a C4 column (Vydac, cat#214TP5115, S/N 060206537204069) is used to desalt and introduce the sample (5 mg) into an API Qstar pulsar i mass spectrometer (Applied Biosystems). A short gradient is used to elute the sample. The gradient is run with mobile phase A (0.08% FA, 0.02% TFA in HPLC water) and mobile phase B (0.08% FA and 0.02% TFA in acetonitrile) at a flow rate of 50 mL/minute. The mass spectrometer is operated at 4.5 kvolts spray voltage with a scan range from 800 to 3500 mass to charge ratio.

### Peptide Mapping

[0209] The antibody or DVD-Ig protein is denatured for 15 minutes at room temperature with a final concentration of 6 M guanidine hydrochloride in 75 mM ammonium bicarbonate. The denatured samples are reduced with a final concentration of 10 mM DTT at 37° C. for 60 minutes, followed by alkylation with 50 mM iodoacetic acid (IAA) in the dark at 37° C. for 30 minutes. Following alkylation, the sample is dialyzed overnight against four liters of 10 mM ammonium bicarbonate at 4° C. The dialyzed sample is diluted to 1 mg/mL with 10 mM ammonium bicarbonate, pH 7.8 and 100 mg of antibody or DVD-Ig protein is either digested with trypsin (Promega, cat# V5111) or Lys-C (Roche, cat#11 047 825 001) at a 1:20 (w/w) trypsin/Lys-C:antibody or DVD-Ig protein ratio at 37° C. for 4 hours. Digests are quenched with 1 mL of 1 N HCl. For peptide mapping with mass spectrometer detection, 40 mL of the digests are separated by reverse phase high performance liquid chromatography (RPHPLC) on a C18 column (Vydac, cat#218TP51, S/N NE9606 10.3.5) with an Agilent 1100 HPLC system. The peptide separation is run with a gradient using mobile phase A (0.02% TFA and 0.08% FA in HPLC grade water) and mobile phase B (0.02% TFA and 0.08% FA in acetonitrile) at a flow rate of 50 mL/minutes. The API QSTAR Pulsar i mass spectromer is operated in positive mode at 4.5 kvolts spray voltage and a scan range from 800 to 2500 mass to charge ratio.

### Disulfide Bond Mapping

[0210] To denature the antibody, 100 mL of the antibody or DVD-Ig protein is mixed with 300 mL of 8 M guanidine HCl in 100 mM ammonium bicarbonate. The pH is checked to ensure that it is between 7 and 8 and the samples are denatured for 15 minutes at room temperature in a final concentration of 6 M guanidine HCl. A portion of the denatured sample (100 mL) is diluted to 600 mL with Milli-Q water to give a final guanidine-HCl concentration of 1 M. The sample (220 mg) is digested with either trypsin (Promega, cat #V5111, lot#22265901) or Lys-C (Roche, cat#11047825001, lot#12808000) at a 1:50 trypsin or 1:50 Lys-C: antibody or DVD-Ig protein (w/w) ratios (4.4 mg enzyme: 220 mg sample) at 37° C. for approximately 16 hours. An additional 5 mg of trypsin or Lys-C is added to the samples and digestion is allowed to proceed for an additional 2 hours at 37° C. Digestions are stopped by adding 1 mL of TFA to each sample. Digested samples are separated by RPHPLC using a C18 column (Vydac, cat#218TP51 S/N NE020630-4-1A) on an Agilent HPLC system. The separation is run with the same gradient used for peptide mapping using mobile phase A (0.02% TFA and 0.08% FA in HPLC grade water) and mobile phase B (0.02% TFA and 0.08% FA in acetonitrile) at a flow rate of 50 mL/minute. The HPLC operating conditions are the same as those used for peptide mapping. The API QSTAR Pulsar i mass spectromer is operated in positive mode at 4.5 kvolts spray voltage and a scan range from 800 to 2500 mass-to-charge ratio. Disulfide bonds are assigned by matching the observed MWs of peptides with the predicted MWs of tryptic or Lys-C peptides linked by disulfide bonds.

### Free Sulfhydryl Determination

[0211] The method used to quantify free cysteines in an antibody or DVD-Ig protein is based on the reaction of Ellman's reagent, 5,5¢-dithio-bis(2-nitrobenzoic acid) (DTNB), with sulfhydryl groups (SH) which gives rise to a characteristic chromophoric product, 5-thio-(2-nitrobenzoic acid) (TNB). The reaction is illustrated in the formula:

DTNB+RSH®RS-TNB+TNB-+H+

[0212] The absorbance of the TNB-is measured at 412 nm using a Cary 50 spectrophotometer. An absorbance curve is plotted using dilutions of 2 mercaptoethanol (b-ME) as the free SH standard and the concentrations of the free sulfhydryl groups in the protein are determined from absorbance at 412 nm of the sample.

[0213] The b-ME standard stock is prepared by a serial dilution of 14.2 M b-ME with HPLC grade water to a final concentration of 0.142 mM. Then standards in triplicate for each concentration are prepared. Antibody or DVD-Ig protein is concentrated to 10 mg/mL using an amicon ultra 10,000 MWCO centrifugal filter (Millipore, cat# UFC801096, lot# L3KN5251) and the buffer is changed to the formulation buffer used for adalimumab (5.57 mM sodium phosphate monobasic, 8.69 mM sodium phosphate dibasic, 106.69 mM NaCl, 1.07 mM sodium citrate, 6.45 mM citric acid, 66.68 mM mannitol, pH 5.2, 0.1% (w/v) Tween). The samples are mixed on a shaker at room temperature for 20 minutes. Then 180 mL of 100 mM Tris buffer, pH 8.1 is added to each sample and standard followed by the addition of 300 mL of 2 mM DTNB in 10 mM phosphate buffer, pH 8.1. After thorough mixing, the samples and standards are measured for absorption at 412 nm on a Cary 50 spectrophotometer. The standard curve is obtained by plotting the amount of free SH and OD₄₁₂ nm of the b-ME standards. Free SH content of samples are calculated based on this curve after subtraction of the blank.

### Weak Cation Exchange Chromatography

[0214] Antibody or DVD-Ig protein is diluted to 1 mg/mL with 10 mM sodium phosphate, pH 6.0. Charge heterogeneity is analyzed using a Shimadzu HPLC system with a WCX-10 ProPac analytical column (Dionex, cat#054993, S/N 02722). The samples are loaded on the column in 80% mobile phase A (10 mM sodium phosphate, pH 6.0) and 20% mobile phase B (10 mM sodium phosphate, 500 mM NaCl, pH 6.0) and eluted at a flow rate of 1.0 mL/minute.

### Oligosaccharide Profiling

[0215] Oligosaccharides released after PNGase F treatment of antibody or DVD-Ig protein are derivatized with 2-aminobenzamide (2-AB) labeling reagent. The fluorescent-labeled oligosaccharides are separated by normal phase high performance liquid chromatography (NPHPLC) and the different forms of oligosaccharides are characterized based on retention time comparison with known standards.

[0216] The antibody or DVD-Ig protein is first digested with PNGaseF to cleave N-linked oligosaccharides from the Fc portion of the heavy chain. The antibody or DVD-Ig protein (200 mg) is placed in a 500 mL Eppendorf tube along with 2 mL PNGase F and 3 mL of 10% N-octylglucoside. Phosphate buffered saline is added to bring the final volume to 60 mL. The sample is incubated overnight at 37° C. in an Eppendorf thermomixer set at 700 RPM. Adalimumab lot AFP04C is also digested with PNGase F as a control.

[0217] After PNGase F treatment, the samples are incubated at 95° C. for 5 minutes in an Eppendorf thermomixer set at 750 RPM to precipitate out the proteins, then the samples are placed in an Eppendorf centrifuge for 2 minutes at 10,000 RPM to spin down the precipitated proteins. The supernatent containing the oligosaccharides are transferred to a 500 mL Eppendorf tube and dried in a speed-vac at 65° C.

[0218] The oligosaccharides are labeled with 2AB using a 2AB labeling kit purchased from Prozyme (cat# GKK-404, lot#132026). The labeling reagent is prepared according to the manufacturer's instructions. Acetic acid (150 mL, provided in kit) is added to the DMSO vial (provided in kit) and mixed by pipeting the solution up and down several times. The acetic acid/DMSO mixture (100 mL) is transferred to a vial of 2-AB dye (just prior to use) and mixed until the dye is fully dissolved. The dye solution is then added to a vial of reductant (provided in kit) and mixed well (labeling reagent). The labeling reagent (5 mL) is added to each dried oligosaccharide sample vial, and mixed thoroughly. The reaction vials are placed in an Eppendorf thermomixer set at 65° C. and 700-800 RPM for 2 hours of reaction.

[0219] After the labeling reaction, the excess fluorescent dye is removed using GlycoClean S Cartridges from Prozyme (cat# GKI-4726). Prior to adding the samples, the cartridges are washed with 1 mL of milli-Q water followed with 5 ishes of 1 mL 30% acetic acid solution. Just prior to adding the samples, 1 mL of acetonitrile (Burdick and Jackson, cat# AH015-4) is added to the cartridges.

[0220] After all of the acetonitrile passed through the cartridge, the sample is spotted onto the center of the freshly washed disc and allowed to adsorb onto the disc for 10 minutes. The disc is washed with 1 mL of acetonitrile followed by five ishes of 1 mL of 96% acetonitrile. The cartridges are placed over a 1.5 mL Eppendorf tube and the 2-AB labeled oligosaccharides are eluted with 3 ishes (400 mL each ish) of milli Q water.

[0221] The oligosaccharides are separated using a Glycosep N HPLC (cat# GKI-4728) column connected to a Shimadzu HPLC system. The Shimadzu HPLC system consisted of a system controller, degasser, binary pumps, autosampler with a sample cooler, and a fluorescent detector.

### Stability at Elevated Temperatures

[0222] The buffer of antibody or DVD-Ig protein is either 5.57 mM sodium phosphate monobasic, 8.69 mM sodium phosphate dibasic, 106.69 mM NaCl, 1.07 mM sodium citrate, 6.45 mM citric acid, 66.68 mM mannitol, 0.1% (w/v) Tween, pH 5.2; or 10 mM histidine, 10 mM methionine, 4% mannitol, pH 5.9 using Amicon ultra centrifugal filters. The final concentration of the antibodies or DVD-Ig proteins is adjusted to 2 mg/mL with the appropriate buffers. The antibody or DVD-Ig protein solutions are then filter sterized and 0.25 mL aliquots are prepared under sterile conditions. The aliquots are left at either −80° C., 5° C., 25° C., or 40° C. for 1, 2 or 3 weeks. At the end of the incubation period, the samples are analyzed by size exclusion chromatography and SDS-PAGE.

[0223] The stability samples are analyzed by SDS-PAGE under both reducing and non-reducing conditions. The procedure used is the same as described herein. The gels are stained overnight with colloidal blue stain (Invitrogen cat#46-7015, 46-7016) and destained with Milli-Q water until the background is clear. The stained gels are then scanned using an Epson Expression scanner (model 1680, S/N DASX003641). To obtain more sensitivity, the same gels are silver stained using silver staining kit (Owl Scientific) and the recommended procedures given by the manufacturer is used.

### Dynamic Scanning Fluorimetry

[0224] The DVD-Igs proteins were dialysed in 10 mM citrate 10 mM phosphate buffer, pH 6.0 to get a final concentration of 1 mg/ml. Triplicates were run for each DVD-Ig protein. For each sample, 27 μl of the DVD-Ig protein was added in a well of a 96 well plate and mixed with 3 μl of 4× diluted SYPRO Orange dye (Invitrogen). The dye is supplied in DMSO at a concentration of 5000× and was diluted to the working concentration of 4× in water. The plate was centrifuged for 30 seconds to ensure that both the dye and the protein settle to the bottom of the wells and complete mixing was ensured by gentle aspiration by a pipette tip. The plate was then sealed with an adhesive film.

[0225] A real time PCR (Applied Biosciences, 7500 Series) was used for measuring the change in fluorescence intensities with temperature. The plate was heated from 25° C. to 95° C. at a temperature ramp rate of approximately 0.5° C./minute and emission fluorescence was collected using TAMRA filter. The data was exported to Microsoft Excel and plotted as temperature vs fluorescence for each DVD-Ig protein. Onset of melting was noted as the temperature where the thermogram rises above the baseline fluorescence. SYPRO Orange is a hydrophobic dye and preferentially binds to the exposed hydrophobic residues in an unfolded protein molecule. Hence the onset of unfolding temperature, as measured by an increase in fluorescence, is an indication of the thermal stability of the DVD-Ig protein. The unfolding temperature for the DVD-Ig proteins can be found in Table 12.

TABLE 12
Thermal Stability of DVD-Ig Proteins as Determined by Dynamic
Scanning Fluorimetry

| Parent | | | |
|---|---|---|---|
| Antibody | N-terminal | C-terminal | |
| or DVD- | Variable | Variable | T onset |
| Ig ID | Domain (VD) | Domain (VD) | (deg C.) |
| DVD2683 | TNF (seq 1) | IL-13 (seq 1) | 58 |
| DVD2684 | TNF (seq 1) | IL-13 (seq 1) | 58.2 |
| DVD2686 | TNF (seq 1) | IL-13 (seq 1) | 64.3 |
| DVD2687 | TNF (seq 1) | IL-13 (seq 1) | 57.9 |
| DVD2691 | IL-13 (seq 1) | TNF (seq 1) | 59.2 |
| DVD2734 | TNF (seq 2) | IL-13 (seq 1) | 64.31 |
| DVD2736 | TNF (seq 2) | IL-13 (seq 1) | 65 |
| DVD2737 | TNF (seq 2) | IL-13 (seq 1) | 65.5 |
| DVD2742 | IL-13 (seq 1) | TNF (seq 2) | |
| DVD2784 | TNF (seq 3) | IL-13 (seq 1) | |
| DVD2786 | TNF (seq 3) | IL-13 (seq 1) | |
| DVD2787 | TNF (seq 3) | IL-13 (seq 1) | |
| DVD2789 | IL-13 (seq 1) | TNF (seq 3) | |
| DVD2791 | IL-13 (seq 1) | TNF (seq 3) | |
| DVD3009 | TNF (seq 4) | IL-13 (seq 1) | 63.3 |
| DVD3011 | TNF (seq 4) | IL-13 (seq 1) | |
| DVD3083 | TNF (seq 1) | IL-13 (seq 2) | 66.3 |
| DVD3084 | TNF (seq 1) | IL-13 (seq 2) | 66.9 |
| DVD3086 | TNF (seq 1) | IL-13 (seq 2) | 65.9 |
| DVD3087 | TNF (seq 1) | IL-13 (seq 2) | 65 |
| DVD3093 | TNF (seq 2) | IL-13 (seq 2) | 65.1 |
| DVD3094 | TNF (seq 2) | IL-13 (seq 2) | 66 |
| DVD3096 | TNF (seq 2) | IL-13 (seq 2) | 65.9 |
| DVD3097 | TNF (seq 2) | IL-13 (seq 2) | 66.2 |
| DVD3103 | TNF (seq 3) | IL-13 (seq 2) | |
| DVD3106 | TNF (seq 3) | IL-13 (seq 2) | 64.1 |
| DVD3107 | TNF (seq 3) | IL-13 (seq 2) | 65.1 |
| DVD3113 | TNF (seq 4) | IL-13 (seq 2) | 65.6 |
| DVD3143 | TNF (seq 1) | IL-13 (seq 3) | 63 |
| DVD3144 | TNF (seq 1) | IL-13 (seq 3) | 62.6 |
| DVD3146 | TNF (seq 1) | IL-13 (seq 3) | 61.8 |
| DVD3147 | TNF (seq 1) | IL-13 (seq 3) | 61.5 |
| DVD3154 | TNF (seq 2) | IL-13 (seq 3) | 63.3 |
| DVD3156 | TNF (seq 2) | IL-13 (seq 3) | 61.4 |
| DVD3157 | TNF (seq 2) | IL-13 (seq 3) | 62.5 |
| DVD3163 | TNF (seq 3) | IL-13 (seq 3) | 62.4 |
| DVD3164 | TNF (seq 3) | IL-13 (seq 3) | 63.4 |
| DVD3166 | TNF (seq 3) | IL-13 (seq 3) | 60.8 |
| DVD3167 | TNF (seq 3) | IL-13 (seq 3) | |
| DVD3173 | TNF (seq 4) | IL-13 (seq 3) | 60.8 |
| DVD3174 | TNF (seq 4) | IL-13 (seq 3) | 61.3 |
| DVD3176 | TNF (seq 4) | IL-13 (seq 3) | 60.2 |

[0226] Most DVD-Ig proteins showed an unfolding temperature >50. This DVD-Ig protein profile is similar to that observed for parent antibodies.

### Solubility Determination

[0227] DVD-Ig protein candidates were dialyzed in 15 mM His, pH 6.0. This was followed by concentrating them up to 50 μl in centricons with a 30K cutoff. Solubility was visually confirmed by absence of precipitation after storage at 4° C. and quantitatively determined by UV absorbance measurement at 280 nm.

TABLE 13
Solubility of DVD-Ig Proteins

| Parent | | | | |
|---|---|---|---|---|
| Antibody | N-terminal | C-terminal | | |
| or DVD- | Variable | Variable | Visual | Solubility |
| Ig ID | Domain (VD) | Domain (VD) | observation | (mg/mL) |
| DVD2683 | TNF (seq 1) | IL-13 (seq 1) | clear | >248 |
| DVD2684 | TNF (seq 1) | IL-13 (seq 1) | clear | >154 |
| DVD2686 | TNF (seq 1) | IL-13 (seq 1) | clear | >124 |
| DVD2687 | TNF (seq 1) | IL-13 (seq 1) | clear | >131 |
| DVD2691 | IL-13 (seq 1) | TNF (seq 1) | clear | >110 |
| DVD2734 | TNF (seq 2) | IL-13 (seq 1) | clear | >168 |
| DVD2736 | TNF (seq 2) | IL-13 (seq 1) | clear | >189 |
| DVD2737 | TNF (seq 2) | IL-13 (seq 1) | clear | >165 |
| DVD2742 | IL-13 (seq 1) | TNF (seq 2) | clear | >78 |
| DVD2784 | TNF (seq 3) | IL-13 (seq 1) | clear | >93 |
| DVD2786 | TNF (seq 3) | IL-13 (seq 1) | clear | >75 |
| DVD2787 | TNF (seq 3) | IL-13 (seq 1) | clear | >80 |
| DVD2789 | IL-13 (seq 1) | TNF (seq 3) | clear | >114 |
| DVD2791 | IL-13 (seq 1) | TNF (seq 3) | clear | >83 |
| DVD3009 | TNF (seq 4) | IL-13 (seq 1) | clear | >64 |
| DVD3011 | TNF (seq 4) | IL-13 (seq 1) | clear | >60 |
| DVD3083 | TNF (seq 1) | IL-13 (seq 2) | clear | >128 |
| DVD3084 | TNF (seq 1) | IL-13 (seq 2) | clear | >36 |
| DVD3086 | TNF (seq 1) | IL-13 (seq 2) | clear | >108 |
| DVD3087 | TNF (seq 1) | IL-13 (seq 2) | clear | >174 |
| DVD3093 | TNF (seq 2) | IL-13 (seq 2) | clear | >162 |
| DVD3094 | TNF (seq 2) | IL-13 (seq 2) | clear | >134 |
| DVD3096 | TNF (seq 2) | IL-13 (seq 2) | clear | >118 |
| DVD3097 | TNF (seq 2) | IL-13 (seq 2) | clear | >161 |
| DVD3103 | TNF (seq 3) | IL-13 (seq 2) | clear | >103 |
| DVD3106 | TNF (seq 3) | IL-13 (seq 2) | clear | >171 |
| DVD3107 | TNF (seq 3) | IL-13 (seq 2) | clear | >185 |
| DVD3113 | TNF (seq 4) | IL-13 (seq 2) | clear | >83 |
| DVD3143 | TNF (seq 1) | IL-13 (seq 3) | clear | >160 |
| DVD3144 | TNF (seq 1) | IL-13 (seq 3) | clear | >174 |
| DVD3146 | TNF (seq 1) | IL-13 (seq 3) | clear | >148 |
| DVD3147 | TNF (seq 1) | IL-13 (seq 3) | clear | >83 |
| DVD3154 | TNF (seq 2) | IL-13 (seq 3) | clear | >179 |
| DVD3156 | TNF (seq 2) | IL-13 (seq 3) | clear | >179 |
| DVD3157 | TNF (seq 2) | IL-13 (seq 3) | clear | >142 |
| DVD3163 | TNF (seq 3) | IL-13 (seq 3) | clear | >250 |
| DVD3164 | TNF (seq 3) | IL-13 (seq 3) | clear | >229 |
| DVD3166 | TNF (seq 3) | IL-13 (seq 3) | clear | >160 |
| DVD3167 | TNF (seq 3) | IL-13 (seq 3) | clear | >81 |
| DVD3173 | TNF (seq 4) | IL-13 (seq 3) | clear | >128 |
| DVD3174 | TNF (seq 4) | IL-13 (seq 3) | clear | >90 |
| DVD3176 | TNF (seq 4) | IL-13 (seq 3) | clear | >64 |

[0228] Most DVD-Ig proteins showed clear appearance and could be concentrated to greater than 25 mg/ml. This DVD-Ig protein profile is similar to that observed for parent antibodies.

### INCORPORATION BY REFERENCE

[0229] The contents of all cited references (including literature references, patents, patent applications, and websites) that maybe cited throughout this application are hereby expressly incorporated by reference in their entirety for any purpose, as are the references cited therein. The disclosure will employ, unless otherwise indicated, conventional techniques of immunology, molecular biology and cell biology, which are well known in the art.

[0230] The present disclosure also incorporates by reference in their entirety techniques well known in the field of molecular biology and drug delivery. These techniques include, but are not limited to, techniques described in the following publications:
[0231] Ausubel et al. (eds.), CURRENT PROTOCOLS IN MOLECULAR BIOLOGY, John Wiley &Sons, NY (1993);
[0232] Ausubel, F. M. et al. eds., SHORT PROTOCOLS IN MOLECULAR BIOLOGY (4th Ed. 1999) John Wiley & Sons, NY. (ISBN 0-471-32938-X);
[0233] CONTROLLED DRUG BIOAVAILABILITY, DRUG PRODUCT DESIGN AND PERFORMANCE, Smolen and Ball (eds.), Wiley, New York (1984);
[0234] Giege, R. and Ducruix, A. Barrett, CRYSTALLIZATION OF NUCLEIC ACIDS AND PROTEINS, a Practical Approach, 2nd ea., pp. 20 1-16, Oxford University Press, New York, N.Y., (1999);
[0235] Goodson, in MEDICAL APPLICATIONS OF CONTROLLED RELEASE, vol. 2, pp. 115-138 (1984);
[0236] Hammerling, et al., in: MONOCLONAL ANTIBODIES AND T-CELL HYBRIDOMAS 563-681 (Elsevier, N.Y., 1981;
[0237] Harlow et al., ANTIBODIES: A LABORATORY MANUAL, (Cold Spring Harbor Laboratory Press, 2nd ed. 1988);
[0238] Kabat et al., SEQUENCES OF PROTEINS OF IMMUNOLOGICAL INTEREST (National Institutes of Health, Bethesda, Md. (1987) and (1991);
[0239] Kabat, E. A., et al. (1991) SEQUENCES OF PROTEINS OF IMMUNOLOGICAL INTEREST, Fifth Edition, U.S. Department of Health and Human Services, NIH Publication No. 91-3242; Kontermann and Dubel eds., ANTIBODY ENGINEERING (2001) Springer-Verlag. New York. 790 pp. (ISBN 3-540-41354-5).
[0240] Kriegler, Gene Transfer and Expression, A Laboratory Manual, Stockton Press, NY (1990);
[0241] Lu and Weiner eds., CLONING AND EXPRESSION VECTORS FOR GENE FUNCTION ANALYSIS (2001) BioTechniques Press. Westborough, Mass. 298 pp. (ISBN 1-881299-21-X).
[0242] MEDICAL APPLICATIONS OF CONTROLLED RELEASE, Langer and Wise (eds.), CRC Pres., Boca Raton, Fla. (1974);
[0243] Old, R. W. & S. B. Primrose, PRINCIPLES OF GENE MANIPULATION: AN INTRODUCTION TO GENETIC ENGINEERING (3d Ed. 1985) Blackwell Scientific Publications, Boston. Studies in Microbiology; V.2:409 pp. (ISBN 0-632-01318-4).
[0244] Sambrook, J. et al. eds., MOLECULAR CLONING: A LABORATORY MANUAL (2d Ed. 1989) Cold Spring Harbor Laboratory Press, NY. Vols. 1-3. (ISBN 0-87969-309-6).
[0245] SUSTAINED AND CONTROLLED RELEASE DRUG DELIVERY SYSTEMS, J. R. Robinson, ed., Marcel Dekker, Inc., New York, 1978
[0246] Winnacker, E. L. FROM GENES TO CLONES: INTRODUCTION TO GENE TECHNOLOGY (1987) VCH Publishers, NY (translated by Horst Ibelgaufts). 634 pp. (ISBN 0-89573-614-4).

### EQUIVALENTS

[0247] The disclosure may be embodied in other specific forms without departing from the spirit or essential characteristics thereof. The foregoing embodiments are therefore to be considered in all respects illustrative rather than limiting of the disclosure. Scope of the disclosure is thus indicated by the appended claims rather than by the foregoing description, and all changes that come within the meaning and range of equivalency of the claims are therefore intended to be embraced herein.

The application's sequence listing, which the Patent Office published only in electronic form, follows.

SEQUENCE LISTING (505 sequences)

SEQ ID NO: 1 - protein, 16 aa, Artificial Sequence
  Description of Artificial Sequence: Synthetic peptide
AKTTPKLEEGEFSEAR

SEQ ID NO: 2 - protein, 17 aa, Artificial Sequence
  Description of Artificial Sequence: Synthetic peptide
AKTTPKLEEGEFSEARV

SEQ ID NO: 3 - protein, 9 aa, Artificial Sequence
  Description of Artificial Sequence: Synthetic peptide
AKTTPKLGG

SEQ ID NO: 4 - protein, 10 aa, Artificial Sequence
  Description of Artificial Sequence: Synthetic peptide
SAKTTPKLGG

SEQ ID NO: 5 - protein, 6 aa, Artificial Sequence
  Description of Artificial Sequence: Synthetic peptide
SAKTTP

SEQ ID NO: 6 - protein, 6 aa, Artificial Sequence
  Description of Artificial Sequence: Synthetic peptide
RADAAP

SEQ ID NO: 7 - protein, 9 aa, Artificial Sequence
  Description of Artificial Sequence: Synthetic peptide
RADAAPTVS

SEQ ID NO: 8 - protein, 12 aa, Artificial Sequence
  Description of Artificial Sequence: Synthetic peptide
RADAAAAGGPGS

SEQ ID NO: 9 - protein, 27 aa, Artificial Sequence
  Description of Artificial Sequence: Synthetic peptide
RADAAAAGGGGSGGGGSGGGGSGGGGS

SEQ ID NO: 10 - protein, 18 aa, Artificial Sequence
  Description of Artificial Sequence: Synthetic peptide
SAKTTPKLEEGEFSEARV

SEQ ID NO: 11 - protein, 5 aa, Artificial Sequence
  Description of Artificial Sequence: Synthetic peptide
ADAAP

SEQ ID NO: 12 - protein, 12 aa, Artificial Sequence
  Description of Artificial Sequence: Synthetic peptide
ADAAPTVSIFPP

SEQ ID NO: 13 - protein, 5 aa, Artificial Sequence
  Description of Artificial Sequence: Synthetic peptide
TVAAP

SEQ ID NO: 14 - protein, 12 aa, Artificial Sequence
  Description of Artificial Sequence: Synthetic peptide
TVAAPSVFIFPP

SEQ ID NO: 15 - protein, 6 aa, Artificial Sequence
  Description of Artificial Sequence: Synthetic peptide
QPKAAP

SEQ ID NO: 16 - protein, 13 aa, Artificial Sequence
  Description of Artificial Sequence: Synthetic peptide
QPKAAPSVTLFPP

SEQ ID NO: 17 - protein, 6 aa, Artificial Sequence
  Description of Artificial Sequence: Synthetic peptide
AKTTPP

SEQ ID NO: 18 - protein, 13 aa, Artificial Sequence
  Description of Artificial Sequence: Synthetic peptide
AKTTPPSVTPLAP

SEQ ID NO: 19 - protein, 6 aa, Artificial Sequence
  Description of Artificial Sequence: Synthetic peptide
AKTTAP

SEQ ID NO: 20 - protein, 13 aa, Artificial Sequence
  Description of Artificial Sequence: Synthetic peptide
AKTTAPSVYPLAP

SEQ ID NO: 21 - protein, 6 aa, Artificial Sequence
  Description of Artificial Sequence: Synthetic peptide
ASTKGP

SEQ ID NO: 22 - protein, 13 aa, Artificial Sequence
  Description of Artificial Sequence: Synthetic peptide
ASTKGPSVFPLAP

SEQ ID NO: 23 - protein, 15 aa, Artificial Sequence
  Description of Artificial Sequence: Synthetic peptide
GGGGSGGGGSGGGGS

SEQ ID NO: 24 - protein, 15 aa, Artificial Sequence
  Description of Artificial Sequence: Synthetic peptide
GENKVEYAPALMALS

SEQ ID NO: 25 - protein, 15 aa, Artificial Sequence
  Description of Artificial Sequence: Synthetic peptide
GPAKELTPLKEAKVS

SEQ ID NO: 26 - protein, 15 aa, Artificial Sequence
  Description of Artificial Sequence: Synthetic peptide
GHEAAAVMQVQYPAS

SEQ ID NO: 27 - protein, 24 aa, Artificial Sequence
  Description of Artificial Sequence: Synthetic peptide
TVAAPSVFIFPPTVAAPSVFIFPP

SEQ ID NO: 28 - protein, 26 aa, Artificial Sequence
  Description of Artificial Sequence: Synthetic peptide
ASTKGPSVFPLAPASTKGPSVFPLAP

SEQ ID NO: 29 - protein, 10 aa, Artificial Sequence
  Description of Artificial Sequence: Synthetic peptide
GGGGSGGGGS

SEQ ID NO: 30 - protein, 9 aa, Artificial Sequence
  Description of Artificial Sequence: Synthetic peptide
GGSGGGGSG

SEQ ID NO: 31 - protein, 5 aa, Artificial Sequence
  Description of Artificial Sequence: Synthetic peptide
GGGGS

SEQ ID NO: 32 - protein, 123 aa, Artificial Sequence
  Description of Artificial Sequence: Synthetic polypeptide
EVTLRESGPGLVKPTQTLTLTCTLYGFSLSTSDMGVDWIRQPPGKGLEWLAHIWWDDVKRYNPALKSRLTISKDTSKNQVVLKLTSVDPVDTATYYCARTVSSGYIYYAMDYWGQGTLVTVSS

SEQ ID NO: 33 - protein, 108 aa, Artificial Sequence
  Description of Artificial Sequence: Synthetic polypeptide
DIQMTQSPSSLSASVGDRVTISCRASQDIRNYLNWYQQKPGKAPKLLIFYTSKLHSGVPSRFSGSGSGTDYTLTISSLQPEDIATYYCQQGLTPPLTFGGGTKVEIKR

SEQ ID NO: 34 - protein, 123 aa, Artificial Sequence
  Description of Artificial Sequence: Synthetic polypeptide
EVQLVQSGAEVKKPGASVKVSCKASGYTFTTYGVSWVRQAPGQGLEWMGEIYPGNYNTYYNEKFRGRVTMTTDTSTSTAYMELRSLRSDDTAVYYCARWRTSYFSDYGYFDYWGQGTTVTVSS

SEQ ID NO: 35 - protein, 113 aa, Artificial Sequence
  Description of Artificial Sequence: Synthetic polypeptide
DVVMTQSPLSLPVTLGQPASISCRSSQSLVHSHGNTYLHWYQQRPGQSPRLLIYTVSNRFSGVPDRFSGSGSGTDFTLKISRVEAEDVGVYYCSQSTHVPYTFGGGTKVEIKR

SEQ ID NO: 36 - protein, 119 aa, Artificial Sequence
  Description of Artificial Sequence: Synthetic polypeptide
EVQLVQSGAEVKKPGASVKVSCKASGYTFTSYWMHWVRQAPGQGLEWIGNINPKGGSNIYNEKFQGRVTMTRDTSISTAYMELSRLRSDDTAVYYCARLDYFGDSFDLWGQGTTVTVSS

SEQ ID NO: 37 - protein, 108 aa, Artificial Sequence
  Description of Artificial Sequence: Synthetic polypeptide
DIQMTQSPSSLSASVGDRVTITCRASQGIRNYLNWYQQKPGKAPKLLIYYASNLEVGVPSRFSGSGSGTDYTLTISSLQPEDFATYYCQQDNRFPYTFGGGTKVEIKR

SEQ ID NO: 38 - protein, 117 aa, Artificial Sequence
  Description of Artificial Sequence: Synthetic polypeptide
EVQLVESGGGLVQPGGSLRLSCAASGFTFSNYGVTWVRQAPGKGLEWVSMIWADGSTHYASSVKGRFTISRDNSKNTLYLQMNSLRAEDTAVYYCAREWQHGPVAYWGQGTLVTVSS

SEQ ID NO: 39 - protein, 108 aa, Artificial Sequence
  Description of Artificial Sequence: Synthetic polypeptide
DIQMTQSPSSLSASVGDRVTITCRASQLVSSAVAWYQQKPGKAPKLLIYWASARHTGVPSRFSGSGSGTDFTLTISSLQPEDFATYYCQQHYKTPFTFGQGTKLEIKR

SEQ ID NO: 40 - protein, 117 aa, Artificial Sequence
  Description of Artificial Sequence: Synthetic polypeptide
EVQLVESGGGLVQPGGSLRLSCAASGFTFSNYGVEWVRQAPGKGLEWVSGIWADGSTHYADTVKSRFTISRDNSKNTLYLQMNSLRAEDTAVYYCAREWQHGPVAYWGQGTLVTVSS

SEQ ID NO: 41 - protein, 108 aa, Artificial Sequence
  Description of Artificial Sequence: Synthetic polypeptide
DIQMTQSPSSLSASVGDRVTITCKASQLVSSAVAWYQQKPGKAPKLLIYWASTLHTGVPSRFSGSGSGTDFTLTISSLQPEDFATYYCQQHYRTPFTFGQGTKLEIKR

SEQ ID NO: 42 - protein, 124 aa, Artificial Sequence
  Description of Artificial Sequence: Synthetic polypeptide
EVQLVQSGAEVKKPGASVKVSCKASGYTFANYGIIWVRQAPGQGLEWMGWINTYTGKPTYAQKFQGRVTMTTDTSTSTAYMELSSLRSEDTAVYYCARKLFTTMDVTDNAMDYWGQGTTVTVSS

SEQ ID NO: 43 - protein, 108 aa, Artificial Sequence
  Description of Artificial Sequence: Synthetic polypeptide
DIQMTQSPSSLSASVGDRVTITCRASQDISQYLNWYQQKPGKAPKLLIYYTSRLQSGVPSRFSGSGSGTDFTLTISSLQPEDFATYFCQQGNTWPPTFGQGTKLEIKR

SEQ ID NO: 44-47 - skipped (4 entries)

SEQ ID NO: 48 - protein, 124 aa, Artificial Sequence
  Description of Artificial Sequence: Synthetic polypeptide
EVQLVQSGAEVKKPGASVKVSCKASGYTFNNYGIIWVRQAPGQGLEWMGWINTYTGKPTYAQKFQGRVTMTTDTSTSTAYMELSSLRSEDTAVYYCARKLFNTVAVTDNAMDYWGQGTTVTVSS

SEQ ID NO: 49 - protein, 108 aa, Artificial Sequence
  Description of Artificial Sequence: Synthetic polypeptide
DIQMTQSPSSLSASVGDRVTITCRASQDIENYLNWYQQKPGKAPKLLIYYTSRLQSGVPSRFSGSGSGTDFTLTISSLQPEDFATYFCQQGNTQPPTFGQGTKLEIKR

SEQ ID NO: 50 - protein, 116 aa, Artificial Sequence
  Description of Artificial Sequence: Synthetic polypeptide
EVQLVQSGAEVKKPGASVKVSCKASGYTFTKYWLGWVRQAPGQGLEWMGDIYPGYDYTHYNEKFKDRVTLTTDTSTSTAYMELRSLRSDDTAVYYCARSDGSSTYWGQGTLVTVSS

SEQ ID NO: 51 - protein, 113 aa, Artificial Sequence
  Description of Artificial Sequence: Synthetic polypeptide
DVLMTQTPLSLPVTPGEPASISCTSSQNIVHSNGNTYLEWYLQKPGQSPQLLIYKVSNRFSGVPDRFSGSGSGTDFTLKISRVEAEDVGVYYCFQVSHVPYTFGGGTKVEIKR

SEQ ID NO: 52 - protein, 116 aa, Artificial Sequence
  Description of Artificial Sequence: Synthetic polypeptide
EVQLVESGGGLVQPGGSLRLSCAASGFSFSKYWLGWVRQAPGKGLEWVSDIYPGYDYTHYNEKFKDRFTISADTSKNTAYLQMNSLRAEDTAVYYCARSDGSSTYWGQGTLVTVSS

SEQ ID NO: 53 - protein, 113 aa, Artificial Sequence
  Description of Artificial Sequence: Synthetic polypeptide
DIQMTQSPSSLSASVGDRVTITCTSSQNIVHSNGNTYLEWYQQKPGKAPKLLIYKVSNRFSGVPSRFSGSGSGTDFTLTISSLQPEDFATYYCFQVSHVPYTFGQGTKVEIKR

SEQ ID NO: 54 - protein, 116 aa, Artificial Sequence
  Description of Artificial Sequence: Synthetic polypeptide
EVQLQQSGPELVTPGASVKISCKASGYTFTKYWLGWVKQSHGKSLEWIGDIYPGYDYTHYNEKFKDTATLTVDKSSSIAYMEIRGLTSEDSAVYYCARSDGSSTYWGQGTLVTVSA

SEQ ID NO: 55 - protein, 113 aa, Artificial Sequence
  Description of Artificial Sequence: Synthetic polypeptide
DVQMIQSPSSLSASLGDIVTMTCTSSQNIVHSNGNTYLEWFQQKPGKAPKLLIYKVSNRFSGVPSRFSGSRYGTDFTLTISSLEDEDLATYFCFQVSHVPYTFGGGTKLEIKR

SEQ ID NO: 56 - protein, 122 aa, Artificial Sequence
  Description of Artificial Sequence: Synthetic polypeptide
EVQLVESGGGLVQPGGSLRLSCAASGFSLTNNNVNWVRQAPGKGLEWVGGVWAGGATDYNSALKSRFTISRDNSKNTAYLQMNSLRAEDTAVYYCARDGGYSSSTLYAMDAWGQGTLVTVSS

SEQ ID NO: 57 - protein, 108 aa, Artificial Sequence
  Description of Artificial Sequence: Synthetic polypeptide
DIQMTQSPSSLSASVGDRVTITCRASEDIYNALAWYQQKPGKAPKLLIYNTDTLHTGVPSRFSGSGSGTDYTLTISSLQPEDFATYFCQHYFHYPRTFGQGTKVEIKR

SEQ ID NO: 58-119 - skipped (62 entries)

SEQ ID NO: 120 - protein, 250 aa, Artificial Sequence
  Description of Artificial Sequence: Synthetic polypeptide
EVQLVESGGGLVQPGGSLRLSCAASGFTFSNYGVTWVRQAPGKGLEWVSMIWADGSTHYASSVKGRFTISRDNSKNTLYLQMNSLRAEDTAVYYCAREWQHGPVAYWGQGTLVTVSSGGGGSGGGGSEVTLRESGPGLVKPTQTLTLTCTLYGFSLSTSDMGVDWIRQPPGKGLEWLAHIWWDDVKRYNPALKSRLTISKDTSKNQVVLKLTSVDPVDTATYYCARTVSSGYIYYAMDYWGQGTLVTVSS

SEQ ID NO: 121 - protein, 225 aa, Artificial Sequence
  Description of Artificial Sequence: Synthetic polypeptide
DIQMTQSPSSLSASVGDRVTITCRASQLVSSAVAWYQQKPGKAPKLLIYWASARHTGVPSRFSGSGSGTDFTLTISSLQPEDFATYYCQQHYKTPFTFGQGTKLEIKRGGSGGGGSGDIQMTQSPSSLSASVGDRVTISCRASQDIRNYLNWYQQKPGKAPKLLIFYTSKLHSGVPSRFSGSGSGTDYTLTISSLQPEDIATYYCQQGLTPPLTFGGGTKVEIKR

SEQ ID NO: 122 - protein, 246 aa, Artificial Sequence
  Description of Artificial Sequence: Synthetic polypeptide
EVQLVESGGGLVQPGGSLRLSCAASGFTFSNYGVTWVRQAPGKGLEWVSMIWADGSTHYASSVKGRFTISRDNSKNTLYLQMNSLRAEDTAVYYCAREWQHGPVAYWGQGTLVTVSSASTKGPEVTLRESGPGLVKPTQTLTLTCTLYGFSLSTSDMGVDWIRQPPGKGLEWLAHIWWDDVKRYNPALKSRLTISKDTSKNQVVLKLTSVDPVDTATYYCARTVSSGYIYYAMDYWGQGTLVTVSS

SEQ ID NO: 123 - protein, 221 aa, Artificial Sequence
  Description of Artificial Sequence: Synthetic polypeptide
DIQMTQSPSSLSASVGDRVTITCRASQLVSSAVAWYQQKPGKAPKLLIYWASARHTGVPSRFSGSGSGTDFTLTISSLQPEDFATYYCQQHYKTPFTFGQGTKLEIKRTVAAPDIQMTQSPSSLSASVGDRVTISCRASQDIRNYLNWYQQKPGKAPKLLIFYTSKLHSGVPSRFSGSGSGTDYTLTISSLQPEDIATYYCQQGLTPPLTFGGGTKVEIKR

SEQ ID NO: 124 - protein, 246 aa, Artificial Sequence; identical to SEQ ID NO: 122
  Description of Artificial Sequence: Synthetic polypeptide

SEQ ID NO: 125 - protein, 228 aa, Artificial Sequence
  Description of Artificial Sequence: Synthetic polypeptide
DIQMTQSPSSLSASVGDRVTITCRASQLVSSAVAWYQQKPGKAPKLLIYWASARHTGVPSRFSGSGSGTDFTLTISSLQPEDFATYYCQQHYKTPFTFGQGTKLEIKRTVAAPSVFIFPPDIQMTQSPSSLSASVGDRVTISCRASQDIRNYLNWYQQKPGKAPKLLIFYTSKLHSGVPSRFSGSGSGTDYTLTISSLQPEDIATYYCQQGLTPPLTFGGGTKVEIKR

SEQ ID NO: 126 - protein, 253 aa, Artificial Sequence
  Description of Artificial Sequence: Synthetic polypeptide
EVQLVESGGGLVQPGGSLRLSCAASGFTFSNYGVTWVRQAPGKGLEWVSMIWADGSTHYASSVKGRFTISRDNSKNTLYLQMNSLRAEDTAVYYCAREWQHGPVAYWGQGTLVTVSSASTKGPSVFPLAPEVTLRESGPGLVKPTQTLTLTCTLYGFSLSTSDMGVDWIRQPPGKGLEWLAHIWWDDVKRYNPALKSRLTISKDTSKNQVVLKLTSVDPVDTATYYCARTVSSGYIYYAMDYWGQGTLVTVSS

SEQ ID NO: 127 - protein, 221 aa, Artificial Sequence; identical to SEQ ID NO: 123
  Description of Artificial Sequence: Synthetic polypeptide

SEQ ID NO: 128 - protein, 250 aa, Artificial Sequence
  Description of Artificial Sequence: Synthetic polypeptide
EVTLRESGPGLVKPTQTLTLTCTLYGFSLSTSDMGVDWIRQPPGKGLEWLAHIWWDDVKRYNPALKSRLTISKDTSKNQVVLKLTSVDPVDTATYYCARTVSSGYIYYAMDYWGQGTLVTVSSGGGGSGGGGSEVQLVESGGGLVQPGGSLRLSCAASGFTFSNYGVTWVRQAPGKGLEWVSMIWADGSTHYASSVKGRFTISRDNSKNTLYLQMNSLRAEDTAVYYCAREWQHGPVAYWGQGTLVTVSS

SEQ ID NO: 129 - protein, 225 aa, Artificial Sequence
  Description of Artificial Sequence: Synthetic polypeptide
DIQMTQSPSSLSASVGDRVTISCRASQDIRNYLNWYQQKPGKAPKLLIFYTSKLHSGVPSRFSGSGSGTDYTLTISSLQPEDIATYYCQQGLTPPLTFGGGTKVEIKRGGSGGGGSGDIQMTQSPSSLSASVGDRVTITCRASQLVSSAVAWYQQKPGKAPKLLIYWASARHTGVPSRFSGSGSGTDFTLTISSLQPEDFATYYCQQHYKTPFTFGQGTKLEIKR

SEQ ID NO: 130 - protein, 246 aa, Artificial Sequence
  Description of Artificial Sequence: Synthetic polypeptide
EVTLRESGPGLVKPTQTLTLTCTLYGFSLSTSDMGVDWIRQPPGKGLEWLAHIWWDDVKRYNPALKSRLTISKDTSKNQVVLKLTSVDPVDTATYYCARTVSSGYIYYAMDYWGQGTLVTVSSASTKGPEVQLVESGGGLVQPGGSLRLSCAASGFTFSNYGVTWVRQAPGKGLEWVSMIWADGSTHYASSVKGRFTISRDNSKNTLYLQMNSLRAEDTAVYYCAREWQHGPVAYWGQGTLVTVSS

SEQ ID NO: 131 - protein, 221 aa, Artificial Sequence
  Description of Artificial Sequence: Synthetic polypeptide
DIQMTQSPSSLSASVGDRVTISCRASQDIRNYLNWYQQKPGKAPKLLIFYTSKLHSGVPSRFSGSGSGTDYTLTISSLQPEDIATYYCQQGLTPPLTFGGGTKVEIKRTVAAPDIQMTQSPSSLSASVGDRVTITCRASQLVSSAVAWYQQKPGKAPKLLIYWASARHTGVPSRFSGSGSGTDFTLTISSLQPEDFATYYCQQHYKTPFTFGQGTKLEIKR

SEQ ID NO: 132 - protein, 246 aa, Artificial Sequence; identical to SEQ ID NO: 130
  Description of Artificial Sequence: Synthetic polypeptide

SEQ ID NO: 133 - protein, 228 aa, Artificial Sequence
  Description of Artificial Sequence: Synthetic polypeptide
DIQMTQSPSSLSASVGDRVTISCRASQDIRNYLNWYQQKPGKAPKLLIFYTSKLHSGVPSRFSGSGSGTDYTLTISSLQPEDIATYYCQQGLTPPLTFGGGTKVEIKRTVAAPSVFIFPPDIQMTQSPSSLSASVGDRVTITCRASQLVSSAVAWYQQKPGKAPKLLIYWASARHTGVPSRFSGSGSGTDFTLTISSLQPEDFATYYCQQHYKTPFTFGQGTKLEIKR

SEQ ID NO: 134 - protein, 253 aa, Artificial Sequence
  Description of Artificial Sequence: Synthetic polypeptide
EVTLRESGPGLVKPTQTLTLTCTLYGFSLSTSDMGVDWIRQPPGKGLEWLAHIWWDDVKRYNPALKSRLTISKDTSKNQVVLKLTSVDPVDTATYYCARTVSSGYIYYAMDYWGQGTLVTVSSASTKGPSVFPLAPEVQLVESGGGLVQPGGSLRLSCAASGFTFSNYGVTWVRQAPGKGLEWVSMIWADGSTHYASSVKGRFTISRDNSKNTLYLQMNSLRAEDTAVYYCAREWQHGPVAYWGQGTLVTVSS

SEQ ID NO: 135 - protein, 221 aa, Artificial Sequence; identical to SEQ ID NO: 131
  Description of Artificial Sequence: Synthetic polypeptide

SEQ ID NO: 136 - protein, 250 aa, Artificial Sequence
  Description of Artificial Sequence: Synthetic polypeptide
EVQLVESGGGLVQPGGSLRLSCAASGFTFSNYGVEWVRQAPGKGLEWVSGIWADGSTHYADTVKSRFTISRDNSKNTLYLQMNSLRAEDTAVYYCAREWQHGPVAYWGQGTLVTVSSGGGGSGGGGSEVTLRESGPGLVKPTQTLTLTCTLYGFSLSTSDMGVDWIRQPPGKGLEWLAHIWWDDVKRYNPALKSRLTISKDTSKNQVVLKLTSVDPVDTATYYCARTVSSGYIYYAMDYWGQGTLVTVSS

SEQ ID NO: 137 - protein, 225 aa, Artificial Sequence
  Description of Artificial Sequence: Synthetic polypeptide
DIQMTQSPSSLSASVGDRVTITCKASQLVSSAVAWYQQKPGKAPKLLIYWASTLHTGVPSRFSGSGSGTDFTLTISSLQPEDFATYYCQQHYRTPFTFGQGTKLEIKRGGSGGGGSGDIQMTQSPSSLSASVGDRVTISCRASQDIRNYLNWYQQKPGKAPKLLIFYTSKLHSGVPSRFSGSGSGTDYTLTISSLQPEDIATYYCQQGLTPPLTFGGGTKVEIKR

SEQ ID NO: 138 - protein, 246 aa, Artificial Sequence
  Description of Artificial Sequence: Synthetic polypeptide
EVQLVESGGGLVQPGGSLRLSCAASGFTFSNYGVEWVRQAPGKGLEWVSGIWADGSTHYADTVKSRFTISRDNSKNTLYLQMNSLRAEDTAVYYCAREWQHGPVAYWGQGTLVTVSSASTKGPEVTLRESGPGLVKPTQTLTLTCTLYGFSLSTSDMGVDWIRQPPGKGLEWLAHIWWDDVKRYNPALKSRLTISKDTSKNQVVLKLTSVDPVDTATYYCARTVSSGYIYYAMDYWGQGTLVTVSS

SEQ ID NO: 139 - protein, 221 aa, Artificial Sequence
  Description of Artificial Sequence: Synthetic polypeptide
DIQMTQSPSSLSASVGDRVTITCKASQLVSSAVAWYQQKPGKAPKLLIYWASTLHTGVPSRFSGSGSGTDFTLTISSLQPEDFATYYCQQHYRTPFTFGQGTKLEIKRTVAAPDIQMTQSPSSLSASVGDRVTISCRASQDIRNYLNWYQQKPGKAPKLLIFYTSKLHSGVPSRFSGSGSGTDYTLTISSLQPEDIATYYCQQGLTPPLTFGGGTKVEIKR

SEQ ID NO: 140 - protein, 246 aa, Artificial Sequence; identical to SEQ ID NO: 138
  Description of Artificial Sequence: Synthetic polypeptide

SEQ ID NO: 141 - protein, 228 aa, Artificial Sequence
  Description of Artificial Sequence: Synthetic polypeptide
DIQMTQSPSSLSASVGDRVTITCKASQLVSSAVAWYQQKPGKAPKLLIYWASTLHTGVPSRFSGSGSGTDFTLTISSLQPEDFATYYCQQHYRTPFTFGQGTKLEIKRTVAAPSVFIFPPDIQMTQSPSSLSASVGDRVTISCRASQDIRNYLNWYQQKPGKAPKLLIFYTSKLHSGVPSRFSGSGSGTDYTLTISSLQPEDIATYYCQQGLTPPLTFGGGTKVEIKR

SEQ ID NO: 142 - protein, 253 aa, Artificial Sequence
  Description of Artificial Sequence: Synthetic polypeptide
EVQLVESGGGLVQPGGSLRLSCAASGFTFSNYGVEWVRQAPGKGLEWVSGIWADGSTHYADTVKSRFTISRDNSKNTLYLQMNSLRAEDTAVYYCAREWQHGPVAYWGQGTLVTVSSASTKGPSVFPLAPEVTLRESGPGLVKPTQTLTLTCTLYGFSLSTSDMGVDWIRQPPGKGLEWLAHIWWDDVKRYNPALKSRLTISKDTSKNQVVLKLTSVDPVDTATYYCARTVSSGYIYYAMDYWGQGTLVTVSS

SEQ ID NO: 143 - protein, 221 aa, Artificial Sequence; identical to SEQ ID NO: 139
  Description of Artificial Sequence: Synthetic polypeptide

SEQ ID NO: 144 - protein, 250 aa, Artificial Sequence
  Description of Artificial Sequence: Synthetic polypeptide
EVTLRESGPGLVKPTQTLTLTCTLYGFSLSTSDMGVDWIRQPPGKGLEWLAHIWWDDVKRYNPALKSRLTISKDTSKNQVVLKLTSVDPVDTATYYCARTVSSGYIYYAMDYWGQGTLVTVSSGGGGSGGGGSEVQLVESGGGLVQPGGSLRLSCAASGFTFSNYGVEWVRQAPGKGLEWVSGIWADGSTHYADTVKSRFTISRDNSKNTLYLQMNSLRAEDTAVYYCAREWQHGPVAYWGQGTLVTVSS

SEQ ID NO: 145 - protein, 225 aa, Artificial Sequence
  Description of Artificial Sequence: Synthetic polypeptide
DIQMTQSPSSLSASVGDRVTISCRASQDIRNYLNWYQQKPGKAPKLLIFYTSKLHSGVPSRFSGSGSGTDYTLTISSLQPEDIATYYCQQGLTPPLTFGGGTKVEIKRGGSGGGGSGDIQMTQSPSSLSASVGDRVTITCKASQLVSSAVAWYQQKPGKAPKLLIYWASTLHTGVPSRFSGSGSGTDFTLTISSLQPEDFATYYCQQHYRTPFTFGQGTKLEIKR

SEQ ID NO: 146 - protein, 246 aa, Artificial Sequence
  Description of Artificial Sequence: Synthetic polypeptide
EVTLRESGPGLVKPTQTLTLTCTLYGFSLSTSDMGVDWIRQPPGKGLEWLAHIWWDDVKRYNPALKSRLTISKDTSKNQVVLKLTSVDPVDTATYYCARTVSSGYIYYAMDYWGQGTLVTVSSASTKGPEVQLVESGGGLVQPGGSLRLSCAASGFTFSNYGVEWVRQAPGKGLEWVSGIWADGSTHYADTVKSRFTISRDNSKNTLYLQMNSLRAEDTAVYYCAREWQHGPVAYWGQGTLVTVSS

SEQ ID NO: 147 - protein, 221 aa, Artificial Sequence
  Description of Artificial Sequence: Synthetic polypeptide
DIQMTQSPSSLSASVGDRVTISCRASQDIRNYLNWYQQKPGKAPKLLIFYTSKLHSGVPSRFSGSGSGTDYTLTISSLQPEDIATYYCQQGLTPPLTFGGGTKVEIKRTVAAPDIQMTQSPSSLSASVGDRVTITCKASQLVSSAVAWYQQKPGKAPKLLIYWASTLHTGVPSRFSGSGSGTDFTLTISSLQPEDFATYYCQQHYRTPFTFGQGTKLEIKR

SEQ ID NO: 148 - protein, 246 aa, Artificial Sequence; identical to SEQ ID NO: 146
  Description of Artificial Sequence: Synthetic polypeptide

SEQ ID NO: 149 - protein, 228 aa, Artificial Sequence
  Description of Artificial Sequence: Synthetic polypeptide
DIQMTQSPSSLSASVGDRVTISCRASQDIRNYLNWYQQKPGKAPKLLIFYTSKLHSGVPSRFSGSGSGTDYTLTISSLQPEDIATYYCQQGLTPPLTFGGGTKVEIKRTVAAPSVFIFPPDIQMTQSPSSLSASVGDRVTITCKASQLVSSAVAWYQQKPGKAPKLLIYWASTLHTGVPSRFSGSGSGTDFTLTISSLQPEDFATYYCQQHYRTPFTFGQGTKLEIKR

SEQ ID NO: 150 - protein, 253 aa, Artificial Sequence
  Description of Artificial Sequence: Synthetic polypeptide
EVTLRESGPGLVKPTQTLTLTCTLYGFSLSTSDMGVDWIRQPPGKGLEWLAHIWWDDVKRYNPALKSRLTISKDTSKNQVVLKLTSVDPVDTATYYCARTVSSGYIYYAMDYWGQGTLVTVSSASTKGPSVFPLAPEVQLVESGGGLVQPGGSLRLSCAASGFTFSNYGVEWVRQAPGKGLEWVSGIWADGSTHYADTVKSRFTISRDNSKNTLYLQMNSLRAEDTAVYYCAREWQHGPVAYWGQGTLVTVSS

SEQ ID NO: 151 - protein, 221 aa, Artificial Sequence; identical to SEQ ID NO: 147
  Description of Artificial Sequence: Synthetic polypeptide

SEQ ID NO: 152 - protein, 257 aa, Artificial Sequence
  Description of Artificial Sequence: Synthetic polypeptide
EVQLVQSGAEVKKPGASVKVSCKASGYTFANYGIIWVRQAPGQGLEWMGWINTYTGKPTYAQKFQGRVTMTTDTSTSTAYMELSSLRSEDTAVYYCARKLFTTMDVTDNAMDYWGQGTTVTVSSGGGGSGGGGSEVTLRESGPGLVKPTQTLTLTCTLYGFSLSTSDMGVDWIRQPPGKGLEWLAHIWWDDVKRYNPALKSRLTISKDTSKNQVVLKLTSVDPVDTATYYCARTVSSGYIYYAMDYWGQGTLVTVSS

SEQ ID NO: 153 - protein, 225 aa, Artificial Sequence
  Description of Artificial Sequence: Synthetic polypeptide
DIQMTQSPSSLSASVGDRVTITCRASQDISQYLNWYQQKPGKAPKLLIYYTSRLQSGVPSRFSGSGSGTDFTLTISSLQPEDFATYFCQQGNTWPPTFGQGTKLEIKRGGSGGGGSGDIQMTQSPSSLSASVGDRVTISCRASQDIRNYLNWYQQKPGKAPKLLIFYTSKLHSGVPSRFSGSGSGTDYTLTISSLQPEDIATYYCQQGLTPPLTFGGGTKVEIKR

SEQ ID NO: 154 - protein, 253 aa, Artificial Sequence
  Description of Artificial Sequence: Synthetic polypeptide
EVQLVQSGAEVKKPGASVKVSCKASGYTFANYGIIWVRQAPGQGLEWMGWINTYTGKPTYAQKFQGRVTMTTDTSTSTAYMELSSLRSEDTAVYYCARKLFTTMDVTDNAMDYWGQGTTVTVSSASTKGPEVTLRESGPGLVKPTQTLTLTCTLYGFSLSTSDMGVDWIRQPPGKGLEWLAHIWWDDVKRYNPALKSRLTISKDTSKNQVVLKLTSVDPVDTATYYCARTVSSGYIYYAMDYWGQGTLVTVSS

SEQ ID NO: 155 - protein, 221 aa, Artificial Sequence
  Description of Artificial Sequence: Synthetic polypeptide
DIQMTQSPSSLSASVGDRVTITCRASQDISQYLNWYQQKPGKAPKLLIYYTSRLQSGVPSRFSGSGSGTDFTLTISSLQPEDFATYFCQQGNTWPPTFGQGTKLEIKRTVAAPDIQMTQSPSSLSASVGDRVTISCRASQDIRNYLNWYQQKPGKAPKLLIFYTSKLHSGVPSRFSGSGSGTDYTLTISSLQPEDIATYYCQQGLTPPLTFGGGTKVEIKR

SEQ ID NO: 156 - protein, 253 aa, Artificial Sequence; identical to SEQ ID NO: 154
  Description of Artificial Sequence: Synthetic polypeptide

SEQ ID NO: 157 - protein, 228 aa, Artificial Sequence
  Description of Artificial Sequence: Synthetic polypeptide
DIQMTQSPSSLSASVGDRVTITCRASQDISQYLNWYQQKPGKAPKLLIYYTSRLQSGVPSRFSGSGSGTDFTLTISSLQPEDFATYFCQQGNTWPPTFGQGTKLEIKRTVAAPSVFIFPPDIQMTQSPSSLSASVGDRVTISCRASQDIRNYLNWYQQKPGKAPKLLIFYTSKLHSGVPSRFSGSGSGTDYTLTISSLQPEDIATYYCQQGLTPPLTFGGGTKVEIKR

SEQ ID NO: 158 - protein, 260 aa, Artificial Sequence
  Description of Artificial Sequence: Synthetic polypeptide
EVQLVQSGAEVKKPGASVKVSCKASGYTFANYGIIWVRQAPGQGLEWMGWINTYTGKPTYAQKFQGRVTMTTDTSTSTAYMELSSLRSEDTAVYYCARKLFTTMDVTDNAMDYWGQGTTVTVSSASTKGPSVFPLAPEVTLRESGPGLVKPTQTLTLTCTLYGFSLSTSDMGVDWIRQPPGKGLEWLAHIWWDDVKRYNPALKSRLTISKDTSKNQVVLKLTSVDPVDTATYYCARTVSSGYIYYAMDYWGQGTLVTVSS

SEQ ID NO: 159 - protein, 221 aa, Artificial Sequence; identical to SEQ ID NO: 155
  Description of Artificial Sequence: Synthetic polypeptide

SEQ ID NO: 160 - protein, 257 aa, Artificial Sequence
  Description of Artificial Sequence: Synthetic polypeptide
EVTLRESGPGLVKPTQTLTLTCTLYGFSLSTSDMGVDWIRQPPGKGLEWLAHIWWDDVKRYNPALKSRLTISKDTSKNQVVLKLTSVDPVDTATYYCARTVSSGYIYYAMDYWGQGTLVTVSSGGGGSGGGGSEVQLVQSGAEVKKPGASVKVSCKASGYTFANYGIIWVRQAPGQGLEWMGWINTYTGKPTYAQKFQGRVTMTTDTSTSTAYMELSSLRSEDTAVYYCARKLFTTMDVTDNAMDYWGQGTTVTVSS

SEQ ID NO: 161 - protein, 225 aa, Artificial Sequence
  Description of Artificial Sequence: Synthetic polypeptide
DIQMTQSPSSLSASVGDRVTISCRASQDIRNYLNWYQQKPGKAPKLLIFYTSKLHSGVPSRFSGSGSGTDYTLTISSLQPEDIATYYCQQGLTPPLTFGGGTKVEIKRGGSGGGGSGDIQMTQSPSSLSASVGDRVTITCRASQDISQYLNWYQQKPGKAPKLLIYYTSRLQSGVPSRFSGSGSGTDFTLTISSLQPEDFATYFCQQGNTWPPTFGQGTKLEIKR

SEQ ID NO: 162 - protein, 253 aa, Artificial Sequence
  Description of Artificial Sequence: Synthetic polypeptide
EVTLRESGPGLVKPTQTLTLTCTLYGFSLSTSDMGVDWIRQPPGKGLEWLAHIWWDDVKRYNPALKSRLTISKDTSKNQVVLKLTSVDPVDTATYYCARTVSSGYIYYAMDYWGQGTLVTVSSASTKGPEVQLVQSGAEVKKPGASVKVSCKASGYTFANYGIIWVRQAPGQGLEWMGWINTYTGKPTYAQKFQGRVTMTTDTSTSTAYMELSSLRSEDTAVYYCARKLFTTMDVTDNAMDYWGQGTTVTVSS

SEQ ID NO: 163 - protein, 221 aa, Artificial Sequence
  Description of Artificial Sequence: Synthetic polypeptide
DIQMTQSPSSLSASVGDRVTISCRASQDIRNYLNWYQQKPGKAPKLLIFYTSKLHSGVPSRFSGSGSGTDYTLTISSLQPEDIATYYCQQGLTPPLTFGGGTKVEIKRTVAAPDIQMTQSPSSLSASVGDRVTITCRASQDISQYLNWYQQKPGKAPKLLIYYTSRLQSGVPSRFSGSGSGTDFTLTISSLQPEDFATYFCQQGNTWPPTFGQGTKLEIKR

SEQ ID NO: 164 - protein, 253 aa, Artificial Sequence; identical to SEQ ID NO: 162
  Description of Artificial Sequence: Synthetic polypeptide

SEQ ID NO: 165 - protein, 228 aa, Artificial Sequence
  Description of Artificial Sequence: Synthetic polypeptide
DIQMTQSPSSLSASVGDRVTISCRASQDIRNYLNWYQQKPGKAPKLLIFYTSKLHSGVPSRFSGSGSGTDYTLTISSLQPEDIATYYCQQGLTPPLTFGGGTKVEIKRTVAAPSVFIFPPDIQMTQSPSSLSASVGDRVTITCRASQDISQYLNWYQQKPGKAPKLLIYYTSRLQSGVPSRFSGSGSGTDFTLTISSLQPEDFATYFCQQGNTWPPTFGQGTKLEIKR

SEQ ID NO: 166 - protein, 260 aa, Artificial Sequence
  Description of Artificial Sequence: Synthetic polypeptide
EVTLRESGPGLVKPTQTLTLTCTLYGFSLSTSDMGVDWIRQPPGKGLEWLAHIWWDDVKRYNPALKSRLTISKDTSKNQVVLKLTSVDPVDTATYYCARTVSSGYIYYAMDYWGQGTLVTVSSASTKGPSVFPLAPEVQLVQSGAEVKKPGASVKVSCKASGYTFANYGIIWVRQAPGQGLEWMGWINTYTGKPTYAQKFQGRVTMTTDTSTSTAYMELSSLRSEDTAVYYCARKLFTTMDVTDNAMDYWGQGTTVTVSS

SEQ ID NO: 167 - protein, 221 aa, Artificial Sequence; identical to SEQ ID NO: 163
  Description of Artificial Sequence: Synthetic polypeptide

SEQ ID NO: 168 - protein, 257 aa, Artificial Sequence
  Description of Artificial Sequence: Synthetic polypeptide
EVQLVQSGAEVKKPGASVKVSCKASGYTFNNYGIIWVRQAPGQGLEWMGWINTYTGKPTYAQKFQGRVTMTTDTSTSTAYMELSSLRSEDTAVYYCARKLFNTVAVTDNAMDYWGQGTTVTVSSGGGGSGGGGSEVTLRESGPGLVKPTQTLTLTCTLYGFSLSTSDMGVDWIRQPPGKGLEWLAHIWWDDVKRYNPALKSRLTISKDTSKNQVVLKLTSVDPVDTATYYCARTVSSGYIYYAMDYWGQGTLVTVSS

SEQ ID NO: 169 - protein, 225 aa, Artificial Sequence
  Description of Artificial Sequence: Synthetic polypeptide
DIQMTQSPSSLSASVGDRVTITCRASQDIENYLNWYQQKPGKAPKLLIYYTSRLQSGVPSRFSGSGSGTDFTLTISSLQPEDFATYFCQQGNTQPPTFGQGTKLEIKRGGSGGGGSGDIQMTQSPSSLSASVGDRVTISCRASQDIRNYLNWYQQKPGKAPKLLIFYTSKLHSGVPSRFSGSGSGTDYTLTISSLQPEDIATYYCQQGLTPPLTFGGGTKVEIKR

SEQ ID NO: 170 - protein, 253 aa, Artificial Sequence
  Description of Artificial Sequence: Synthetic polypeptide
EVQLVQSGAEVKKPGASVKVSCKASGYTFNNYGIIWVRQAPGQGLEWMGWINTYTGKPTYAQKFQGRVTMTTDTSTSTAYMELSSLRSEDTAVYYCARKLFNTVAVTDNAMDYWGQGTTVTVSSASTKGPEVTLRESGPGLVKPTQTLTLTCTLYGFSLSTSDMGVDWIRQPPGKGLEWLAHIWWDDVKRYNPALKSRLTISKDTSKNQVVLKLTSVDPVDTATYYCARTVSSGYIYYAMDYWGQGTLVTVSS

SEQ ID NO: 171 - protein, 221 aa, Artificial Sequence
  Description of Artificial Sequence: Synthetic polypeptide
DIQMTQSPSSLSASVGDRVTITCRASQDIENYLNWYQQKPGKAPKLLIYYTSRLQSGVPSRFSGSGSGTDFTLTISSLQPEDFATYFCQQGNTQPPTFGQGTKLEIKRTVAAPDIQMTQSPSSLSASVGDRVTISCRASQDIRNYLNWYQQKPGKAPKLLIFYTSKLHSGVPSRFSGSGSGTDYTLTISSLQPEDIATYYCQQGLTPPLTFGGGTKVEIKR

SEQ ID NO: 172 - protein, 253 aa, Artificial Sequence; identical to SEQ ID NO: 170
  Description of Artificial Sequence: Synthetic polypeptide

SEQ ID NO: 173 - protein, 228 aa, Artificial Sequence
  Description of Artificial Sequence: Synthetic polypeptide
DIQMTQSPSSLSASVGDRVTITCRASQDIENYLNWYQQKPGKAPKLLIYYTSRLQSGVPSRFSGSGSGTDFTLTISSLQPEDFATYFCQQGNTQPPTFGQGTKLEIKRTVAAPSVFIFPPDIQMTQSPSSLSASVGDRVTISCRASQDIRNYLNWYQQKPGKAPKLLIFYTSKLHSGVPSRFSGSGSGTDYTLTISSLQPEDIATYYCQQGLTPPLTFGGGTKVEIKR

SEQ ID NO: 174 - protein, 260 aa, Artificial Sequence
  Description of Artificial Sequence: Synthetic polypeptide
EVQLVQSGAEVKKPGASVKVSCKASGYTFNNYGIIWVRQAPGQGLEWMGWINTYTGKPTYAQKFQGRVTMTTDTSTSTAYMELSSLRSEDTAVYYCARKLFNTVAVTDNAMDYWGQGTTVTVSSASTKGPSVFPLAPEVTLRESGPGLVKPTQTLTLTCTLYGFSLSTSDMGVDWIRQPPGKGLEWLAHIWWDDVKRYNPALKSRLTISKDTSKNQVVLKLTSVDPVDTATYYCARTVSSGYIYYAMDYWGQGTLVTVSS

SEQ ID NO: 175 - protein, 221 aa, Artificial Sequence; identical to SEQ ID NO: 171
  Description of Artificial Sequence: Synthetic polypeptide

SEQ ID NO: 176 - protein, 257 aa, Artificial Sequence
  Description of Artificial Sequence: Synthetic polypeptide
EVTLRESGPGLVKPTQTLTLTCTLYGFSLSTSDMGVDWIRQPPGKGLEWLAHIWWDDVKRYNPALKSRLTISKDTSKNQVVLKLTSVDPVDTATYYCARTVSSGYIYYAMDYWGQGTLVTVSSGGGGSGGGGSEVQLVQSGAEVKKPGASVKVSCKASGYTFNNYGIIWVRQAPGQGLEWMGWINTYTGKPTYAQKFQGRVTMTTDTSTSTAYMELSSLRSEDTAVYYCARKLFNTVAVTDNAMDYWGQGTTVTVSS

SEQ ID NO: 177 - protein, 225 aa, Artificial Sequence
  Description of Artificial Sequence: Synthetic polypeptide
DIQMTQSPSSLSASVGDRVTISCRASQDIRNYLNWYQQKPGKAPKLLIFYTSKLHSGVPSRFSGSGSGTDYTLTISSLQPEDIATYYCQQGLTPPLTFGGGTKVEIKRGGSGGGGSGDIQMTQSPSSLSASVGDRVTITCRASQDIENYLNWYQQKPGKAPKLLIYYTSRLQSGVPSRFSGSGSGTDFTLTISSLQPEDFATYFCQQGNTQPPTFGQGTKLEIKR

SEQ ID NO: 178 - protein, 253 aa, Artificial Sequence
  Description of Artificial Sequence: Synthetic polypeptide
EVTLRESGPGLVKPTQTLTLTCTLYGFSLSTSDMGVDWIRQPPGKGLEWLAHIWWDDVKRYNPALKSRLTISKDTSKNQVVLKLTSVDPVDTATYYCARTVSSGYIYYAMDYWGQGTLVTVSSASTKGPEVQLVQSGAEVKKPGASVKVSCKASGYTFNNYGIIWVRQAPGQGLEWMGWINTYTGKPTYAQKFQGRVTMTTDTSTSTAYMELSSLRSEDTAVYYCARKLFNTVAVTDNAMDYWGQGTTVTVSS

SEQ ID NO: 179 - protein, 221 aa, Artificial Sequence
  Description of Artificial Sequence: Synthetic polypeptide
DIQMTQSPSSLSASVGDRVTISCRASQDIRNYLNWYQQKPGKAPKLLIFYTSKLHSGVPSRFSGSGSGTDYTLTISSLQPEDIATYYCQQGLTPPLTFGGGTKVEIKRTVAAPDIQMTQSPSSLSASVGDRVTITCRASQDIENYLNWYQQKPGKAPKLLIYYTSRLQSGVPSRFSGSGSGTDFTLTISSLQPEDFATYFCQQGNTQPPTFGQGTKLEIKR

SEQ ID NO: 180 - protein, 253 aa, Artificial Sequence; identical to SEQ ID NO: 178
  Description of Artificial Sequence: Synthetic polypeptide

SEQ ID NO: 181 - protein, 228 aa, Artificial Sequence
  Description of Artificial Sequence: Synthetic polypeptide
DIQMTQSPSSLSASVGDRVTISCRASQDIRNYLNWYQQKPGKAPKLLIFYTSKLHSGVPSRFSGSGSGTDYTLTISSLQPEDIATYYCQQGLTPPLTFGGGTKVEIKRTVAAPSVFIFPPDIQMTQSPSSLSASVGDRVTITCRASQDIENYLNWYQQKPGKAPKLLIYYTSRLQSGVPSRFSGSGSGTDFTLTISSLQPEDFATYFCQQGNTQPPTFGQGTKLEIKR

SEQ ID NO: 182 - protein, 260 aa, Artificial Sequence
  Description of Artificial Sequence: Synthetic polypeptide
EVTLRESGPGLVKPTQTLTLTCTLYGFSLSTSDMGVDWIRQPPGKGLEWLAHIWWDDVKRYNPALKSRLTISKDTSKNQVVLKLTSVDPVDTATYYCARTVSSGYIYYAMDYWGQGTLVTVSSASTKGPSVFPLAPEVQLVQSGAEVKKPGASVKVSCKASGYTFNNYGIIWVRQAPGQGLEWMGWINTYTGKPTYAQKFQGRVTMTTDTSTSTAYMELSSLRSEDTAVYYCARKLFNTVAVTDNAMDYWGQGTTVTVSS

SEQ ID NO: 183 - protein, 221 aa, Artificial Sequence; identical to SEQ ID NO: 179
  Description of Artificial Sequence: Synthetic polypeptide

SEQ ID NO: 184 - protein, 250 aa, Artificial Sequence
  Description of Artificial Sequence: Synthetic polypeptide
EVQLVESGGGLVQPGGSLRLSCAASGFTFSNYGVTWVRQAPGKGLEWVSMIWADGSTHYASSVKGRFTISRDNSKNTLYLQMNSLRAEDTAVYYCAREWQHGPVAYWGQGTLVTVSSGGGGSGGGGSEVQLVQSGAEVKKPGASVKVSCKASGYTFTTYGVSWVRQAPGQGLEWMGEIYPGNYNTYYNEKFRGRVTMTTDTSTSTAYMELRSLRSDDTAVYYCARWRTSYFSDYGYFDYWGQGTTVTVSS

SEQ ID NO: 185 - protein, 230 aa, Artificial Sequence
  Description of Artificial Sequence: Synthetic polypeptide
DIQMTQSPSSLSASVGDRVTITCRASQLVSSAVAWYQQKPGKAPKLLIYWASARHTGVPSRFSGSGSGTDFTLTISSLQPEDFATYYCQQHYKTPFTFGQGTKLEIKRGGSGGGGSGDVVMTQSPLSLPVTLGQPASISCRSSQSLVHSHGNTYLHWYQQRPGQSPRLLIYTVSNRFSGVPDRFSGSGSGTDFTLKISRVEAEDVGVYYCSQSTHVPYTFGGGTKVEIKR

SEQ ID NO: 186 - protein, 246 aa, Artificial Sequence
  Description of Artificial Sequence: Synthetic polypeptide
EVQLVESGGGLVQPGGSLRLSCAASGFTFSNYGVTWVRQAPGKGLEWVSMIWADGSTHYASSVKGRFTISRDNSKNTLYLQMNSLRAEDTAVYYCAREWQHGPVAYWGQGTLVTVSSASTKGPEVQLVQSGAEVKKPGASVKVSCKASGYTFTTYGVSWVRQAPGQGLEWMGEIYPGNYNTYYNEKFRGRVTMTTDTSTSTAYMELRSLRSDDTAVYYCARWRTSYFSDYGYFDYWGQGTTVTVSS

SEQ ID NO: 187 - protein, 226 aa, Artificial Sequence
  Description of Artificial Sequence: Synthetic polypeptide
DIQMTQSPSSLSASVGDRVTITCRASQLVSSAVAWYQQKPGKAPKLLIYWASARHTGVPSRFSGSGSGTDFTLTISSLQPEDFATYYCQQHYKTPFTFGQGTKLEIKRTVAAPDVVMTQSPLSLPVTLGQPASISCRSSQSLVHSHGNTYLHWYQQRPGQSPRLLIYTVSNRFSGVPDRFSGSGSGTDFTLKISRVEAEDVGVYYCSQSTHVPYTFGGGTKVEIKR

SEQ ID NO: 188 - protein, 246 aa, Artificial Sequence; identical to SEQ ID NO: 186
  Description of Artificial Sequence: Synthetic polypeptide

SEQ ID NO: 189 - protein, 233 aa, Artificial Sequence
  Description of Artificial Sequence: Synthetic polypeptide
DIQMTQSPSSLSASVGDRVTITCRASQLVSSAVAWYQQKPGKAPKLLIYWASARHTGVPSRFSGSGSGTDFTLTISSLQPEDFATYYCQQHYKTPFTFGQGTKLEIKRTVAAPSVFIFPPDVVMTQSPLSLPVTLGQPASISCRSSQSLVHSHGNTYLHWYQQRPGQSPRLLIYTVSNRFSGVPDRFSGSGSGTDFTLKISRVEAEDVGVYYCSQSTHVPYTFGGGTKVEIKR

SEQ ID NO: 190 - protein, 253 aa, Artificial Sequence
  Description of Artificial Sequence: Synthetic polypeptide
EVQLVESGGGLVQPGGSLRLSCAASGFTFSNYGVTWVRQAPGKGLEWVSMIWADGSTHYASSVKGRFTISRDNSKNTLYLQMNSLRAEDTAVYYCAREWQHGPVAYWGQGTLVTVSSASTKGPSVFPLAPEVQLVQSGAEVKKPGASVKVSCKASGYTFTTYGVSWVRQAPGQGLEWMGEIYPGNYNTYYNEKFRGRVTMTTDTSTSTAYMELRSLRSDDTAVYYCARWRTSYFSDYGYFDYWGQGTTVTVSS

SEQ ID NO: 191 - protein, 226 aa, Artificial Sequence; identical to SEQ ID NO: 187
  Description of Artificial Sequence: Synthetic polypeptide

SEQ ID NO: 192 - protein, 250 aa, Artificial Sequence
  Description of Artificial Sequence: Synthetic polypeptide
EVQLVQSGAEVKKPGASVKVSCKASGYTFTTYGVSWVRQAPGQGLEWMGEIYPGNYNTYYNEKFRGRVTMTTDTSTSTAYMELRSLRSDDTAVYYCARWRTSYFSDYGYFDYWGQGTTVTVSSGGGGSGGGGSEVQLVESGGGLVQPGGSLRLSCAASGFTFSNYGVTWVRQAPGKGLEWVSMIWADGSTHYASSVKGRFTISRDNSKNTLYLQMNSLRAEDTAVYYCAREWQHGPVAYWGQGTLVTVSS

SEQ ID NO: 193 - protein, 230 aa, Artificial Sequence
  Description of Artificial Sequence: Synthetic polypeptide
DVVMTQSPLSLPVTLGQPASISCRSSQSLVHSHGNTYLHWYQQRPGQSPRLLIYTVSNRFSGVPDRFSGSGSGTDFTLKISRVEAEDVGVYYCSQSTHVPYTFGGGTKVEIKRGGSGGGGSGDIQMTQSPSSLSASVGDRVTITCRASQLVSSAVAWYQQKPGKAPKLLIYWASARHTGVPSRFSGSGSGTDFTLTISSLQPEDFATYYCQQHYKTPFTFGQGTKLEIKR

SEQ ID NO: 194 - protein, 246 aa, Artificial Sequence
  Description of Artificial Sequence: Synthetic polypeptide
EVQLVQSGAEVKKPGASVKVSCKASGYTFTTYGVSWVRQAPGQGLEWMGEIYPGNYNTYYNEKFRGRVTMTTDTSTSTAYMELRSLRSDDTAVYYCARWRTSYFSDYGYFDYWGQGTTVTVSSASTKGPEVQLVESGGGLVQPGGSLRLSCAASGFTFSNYGVTWVRQAPGKGLEWVSMIWADGSTHYASSVKGRFTISRDNSKNTLYLQMNSLRAEDTAVYYCAREWQHGPVAYWGQGTLVTVSS

SEQ ID NO: 195 - protein, 226 aa, Artificial Sequence
  Description of Artificial Sequence: Synthetic polypeptide
DVVMTQSPLSLPVTLGQPASISCRSSQSLVHSHGNTYLHWYQQRPGQSPRLLIYTVSNRFSGVPDRFSGSGSGTDFTLKISRVEAEDVGVYYCSQSTHVPYTFGGGTKVEIKRTVAAPDIQMTQSPSSLSASVGDRVTITCRASQLVSSAVAWYQQKPGKAPKLLIYWASARHTGVPSRFSGSGSGTDFTLTISSLQPEDFATYYCQQHYKTPFTFGQGTKLEIKR

SEQ ID NO: 196 - protein, 246 aa, Artificial Sequence; identical to SEQ ID NO: 194
  Description of Artificial Sequence: Synthetic polypeptide

SEQ ID NO: 197 - protein, 233 aa, Artificial Sequence
  Description of Artificial Sequence: Synthetic polypeptide
DVVMTQSPLSLPVTLGQPASISCRSSQSLVHSHGNTYLHWYQQRPGQSPRLLIYTVSNRFSGVPDRFSGSGSGTDFTLKISRVEAEDVGVYYCSQSTHVPYTFGGGTKVEIKRTVAAPSVFIFPPDIQMTQSPSSLSASVGDRVTITCRASQLVSSAVAWYQQKPGKAPKLLIYWASARHTGVPSRFSGSGSGTDFTLTISSLQPEDFATYYCQQHYKTPFTFGQGTKLEIKR

SEQ ID NO: 198 - protein, 253 aa, Artificial Sequence
  Description of Artificial Sequence: Synthetic polypeptide
EVQLVQSGAEVKKPGASVKVSCKASGYTFTTYGVSWVRQAPGQGLEWMGEIYPGNYNTYYNEKFRGRVTMTTDTSTSTAYMELRSLRSDDTAVYYCARWRTSYFSDYGYFDYWGQGTTVTVSSASTKGPSVFPLAPEVQLVESGGGLVQPGGSLRLSCAASGFTFSNYGVTWVRQAPGKGLEWVSMIWADGSTHYASSVKGRFTISRDNSKNTLYLQMNSLRAEDTAVYYCAREWQHGPVAYWGQGTLVTVSS

SEQ ID NO: 199 - protein, 226 aa, Artificial Sequence; identical to SEQ ID NO: 195
  Description of Artificial Sequence: Synthetic polypeptide

SEQ ID NO: 200 - protein, 244 aa, Artificial Sequence
  Description of Artificial Sequence: Synthetic polypeptide
EVQLVESGGGLVQPGGSLRLSCAASGFTFSNYGVEWVRQAPGKGLEWVSGIWADGSTHYADTVKSRFTISRDNSKNTLYLQMNSLRAEDTAVYYCAREWQHGPVAYWGQGTLVTVSSGGGGSGGGGSEVQLVESGGGLVQPGGSLRLSCAASGFTFSNYGVTWVRQAPGKGLEWVSMIWADGSTHYASSVKGRFTISRDNSKNTLYLQMNSLRAEDTAVYYCAREWQHGPVAYWGQGTLVTVSS

SEQ ID NO: 201 - protein, 225 aa, Artificial Sequence
  Description of Artificial Sequence: Synthetic polypeptide
DIQMTQSPSSLSASVGDRVTITCKASQLVSSAVAWYQQKPGKAPKLLIYWASTLHTGVPSRFSGSGSGTDFTLTISSLQPEDFATYYCQQHYRTPFTFGQGTKLEIKRGGSGGGGSGDIQMTQSPSSLSASVGDRVTITCRASQLVSSAVAWYQQKPGKAPKLLIYWASARHTGVPSRFSGSGSGTDFTLTISSLQPEDFATYYCQQHYKTPFTFGQGTKLEIKR

SEQ ID NO: 202 - protein, 240 aa, Artificial Sequence
  Description of Artificial Sequence: Synthetic polypeptide
EVQLVESGGGLVQPGGSLRLSCAASGFTFSNYGVEWVRQAPGKGLEWVSGIWADGSTHYADTVKSRFTISRDNSKNTLYLQMNSLRAEDTAVYYCAREWQHGPVAYWGQGTLVTVSSASTKGPEVQLVESGGGLVQPGGSLRLSCAASGFTFSNYGVTWVRQAPGKGLEWVSMIWADGSTHYASSVKGRFTISRDNSKNTLYLQMNSLRAEDTAVYYCAREWQHGPVAYWGQGTLVTVSS

SEQ ID NO: 203 - protein, 221 aa, Artificial Sequence
  Description of Artificial Sequence: Synthetic polypeptide
DIQMTQSPSSLSASVGDRVTITCKASQLVSSAVAWYQQKPGKAPKLLIYWASTLHTGVPSRFSGSGSGTDFTLTISSLQPEDFATYYCQQHYRTPFTFGQGTKLEIKRTVAAPDIQMTQSPSSLSASVGDRVTITCRASQLVSSAVAWYQQKPGKAPKLLIYWASARHTGVPSRFSGSGSGTDFTLTISSLQPEDFATYYCQQHYKTPFTFGQGTKLEIKR

SEQ ID NO: 204 - protein, 240 aa, Artificial Sequence; identical to SEQ ID NO: 202
  Description of Artificial Sequence: Synthetic polypeptide

SEQ ID NO: 205 - protein, 228 aa, Artificial Sequence
  Description of Artificial Sequence: Synthetic polypeptide
DIQMTQSPSSLSASVGDRVTITCKASQLVSSAVAWYQQKPGKAPKLLIYWASTLHTGVPSRFSGSGSGTDFTLTISSLQPEDFATYYCQQHYRTPFTFGQGTKLEIKRTVAAPSVFIFPPDIQMTQSPSSLSASVGDRVTITCRASQLVSSAVAWYQQKPGKAPKLLIYWASARHTGVPSRFSGSGSGTDFTLTISSLQPEDFATYYCQQHYKTPFTFGQGTKLEIKR

SEQ ID NO: 206 - protein, 247 aa, Artificial Sequence
  Description of Artificial Sequence: Synthetic polypeptide
EVQLVESGGGLVQPGGSLRLSCAASGFTFSNYGVEWVRQAPGKGLEWVSGIWADGSTHYADTVKSRFTISRDNSKNTLYLQMNSLRAEDTAVYYCAREWQHGPVAYWGQGTLVTVSSASTKGPSVFPLAPEVQLVESGGGLVQPGGSLRLSCAASGFTFSNYGVTWVRQAPGKGLEWVSMIWADGSTHYASSVKGRFTISRDNSKNTLYLQMNSLRAEDTAVYYCAREWQHGPVAYWGQGTLVTVSS

SEQ ID NO: 207 - protein, 221 aa, Artificial Sequence; identical to SEQ ID NO: 203
  Description of Artificial Sequence: Synthetic polypeptide

SEQ ID NO: 208 - protein, 250 aa, Artificial Sequence
  Description of Artificial Sequence: Synthetic polypeptide
EVQLVQSGAEVKKPGASVKVSCKASGYTFTTYGVSWVRQAPGQGLEWMGEIYPGNYNTYYNEKFRGRVTMTTDTSTSTAYMELRSLRSDDTAVYYCARWRTSYFSDYGYFDYWGQGTTVTVSSGGGGSGGGGSEVQLVESGGGLVQPGGSLRLSCAASGFTFSNYGVEWVRQAPGKGLEWVSGIWADGSTHYADTVKSRFTISRDNSKNTLYLQMNSLRAEDTAVYYCAREWQHGPVAYWGQGTLVTVSS

SEQ ID NO: 209 - protein, 230 aa, Artificial Sequence
  Description of Artificial Sequence: Synthetic polypeptide
DVVMTQSPLSLPVTLGQPASISCRSSQSLVHSHGNTYLHWYQQRPGQSPRLLIYTVSNRFSGVPDRFSGSGSGTDFTLKISRVEAEDVGVYYCSQSTHVPYTFGGGTKVEIKRGGSGGGGSGDIQMTQSPSSLSASVGDRVTITCKASQLVSSAVAWYQQKPGKAPKLLIYWASTLHTGVPSRFSGSGSGTDFTLTISSLQPEDFATYYCQQHYRTPFTFGQGTKLEIKR

SEQ ID NO: 210 - protein, 246 aa, Artificial Sequence
  Description of Artificial Sequence: Synthetic polypeptide
EVQLVQSGAEVKKPGASVKVSCKASGYTFTTYGVSWVRQAPGQGLEWMGEIYPGNYNTYYNEKFRGRVTMTTDTSTSTAYMELRSLRSDDTAVYYCARWRTSYFSDYGYFDYWGQGTTVTVSSASTKGPEVQLVESGGGLVQPGGSLRLSCAASGFTFSNYGVEWVRQAPGKGLEWVSGIWADGSTHYADTVKSRFTISRDNSKNTLYLQMNSLRAEDTAVYYCAREWQHGPVAYWGQGTLVTVSS

SEQ ID NO: 211 - protein, 226 aa, Artificial Sequence
  Description of Artificial Sequence: Synthetic polypeptide
DVVMTQSPLSLPVTLGQPASISCRSSQSLVHSHGNTYLHWYQQRPGQSPRLLIYTVSNRFSGVPDRFSGSGSGTDFTLKISRVEAEDVGVYYCSQSTHVPYTFGGGTKVEIKRTVAAPDIQMTQSPSSLSASVGDRVTITCKASQLVSSAVAWYQQKPGKAPKLLIYWASTLHTGVPSRFSGSGSGTDFTLTISSLQPEDFATYYCQQHYRTPFTFGQGTKLEIKR

SEQ ID NO: 212 - protein, 246 aa, Artificial Sequence; identical to SEQ ID NO: 210
  Description of Artificial Sequence: Synthetic polypeptide

SEQ ID NO: 213 - protein, 233 aa, Artificial Sequence
  Description of Artificial Sequence: Synthetic polypeptide
DVVMTQSPLSLPVTLGQPASISCRSSQSLVHSHGNTYLHWYQQRPGQSPRLLIYTVSNRFSGVPDRFSGSGSGTDFTLKISRVEAEDVGVYYCSQSTHVPYTFGGGTKVEIKRTVAAPSVFIFPPDIQMTQSPSSLSASVGDRVTITCKASQLVSSAVAWYQQKPGKAPKLLIYWASTLHTGVPSRFSGSGSGTDFTLTISSLQPEDFATYYCQQHYRTPFTFGQGTKLEIKR

SEQ ID NO: 214 - protein, 253 aa, Artificial Sequence
  Description of Artificial Sequence: Synthetic polypeptide
EVQLVQSGAEVKKPGASVKVSCKASGYTFTTYGVSWVRQAPGQGLEWMGEIYPGNYNTYYNEKFRGRVTMTTDTSTSTAYMELRSLRSDDTAVYYCARWRTSYFSDYGYFDYWGQGTTVTVSSASTKGPSVFPLAPEVQLVESGGGLVQPGGSLRLSCAASGFTFSNYGVEWVRQAPGKGLEWVSGIWADGSTHYADTVKSRFTISRDNSKNTLYLQMNSLRAEDTAVYYCAREWQHGPVAYWGQGTLVTVSS

SEQ ID NO: 215 - protein, 226 aa, Artificial Sequence; identical to SEQ ID NO: 211
  Description of Artificial Sequence: Synthetic polypeptide

SEQ ID NO: 216 - protein, 251 aa, Artificial Sequence
  Description of Artificial Sequence: Synthetic polypeptide
EVQLVQSGAEVKKPGASVKVSCKASGYTFANYGIIWVRQAPGQGLEWMGWINTYTGKPTYAQKFQGRVTMTTDTSTSTAYMELSSLRSEDTAVYYCARKLFTTMDVTDNAMDYWGQGTTVTVSSGGGGSGGGGSEVQLVESGGGLVQPGGSLRLSCAASGFTFSNYGVTWVRQAPGKGLEWVSMIWADGSTHYASSVKGRFTISRDNSKNTLYLQMNSLRAEDTAVYYCAREWQHGPVAYWGQGTLVTVSS

SEQ ID NO: 217 - protein, 225 aa, Artificial Sequence
  Description of Artificial Sequence: Synthetic polypeptide
DIQMTQSPSSLSASVGDRVTITCRASQDISQYLNWYQQKPGKAPKLLIYYTSRLQSGVPSRFSGSGSGTDFTLTISSLQPEDFATYFCQQGNTWPPTFGQGTKLEIKRGGSGGGGSGDIQMTQSPSSLSASVGDRVTITCRASQLVSSAVAWYQQKPGKAPKLLIYWASARHTGVPSRFSGSGSGTDFTLTISSLQPEDFATYYCQQHYKTPFTFGQGTKLEIKR

SEQ ID NO: 218 - protein, 247 aa, Artificial Sequence
  Description of Artificial Sequence: Synthetic polypeptide
EVQLVQSGAEVKKPGASVKVSCKASGYTFANYGIIWVRQAPGQGLEWMGWINTYTGKPTYAQKFQGRVTMTTDTSTSTAYMELSSLRSEDTAVYYCARKLFTTMDVTDNAMDYWGQGTTVTVSSASTKGPEVQLVESGGGLVQPGGSLRLSCAASGFTFSNYGVTWVRQAPGKGLEWVSMIWADGSTHYASSVKGRFTISRDNSKNTLYLQMNSLRAEDTAVYYCAREWQHGPVAYWGQGTLVTVSS

SEQ ID NO: 219 - protein, 221 aa, Artificial Sequence
  Description of Artificial Sequence: Synthetic polypeptide
DIQMTQSPSSLSASVGDRVTITCRASQDISQYLNWYQQKPGKAPKLLIYYTSRLQSGVPSRFSGSGSGTDFTLTISSLQPEDFATYFCQQGNTWPPTFGQGTKLEIKRTVAAPDIQMTQSPSSLSASVGDRVTITCRASQLVSSAVAWYQQKPGKAPKLLIYWASARHTGVPSRFSGSGSGTDFTLTISSLQPEDFATYYCQQHYKTPFTFGQGTKLEIKR

SEQ ID NO: 220 - protein, 247 aa, Artificial Sequence; identical to SEQ ID NO: 218
  Description of Artificial Sequence: Synthetic polypeptide

SEQ ID NO: 221 - protein, 228 aa, Artificial Sequence
  Description of Artificial Sequence: Synthetic polypeptide
DIQMTQSPSSLSASVGDRVTITCRASQDISQYLNWYQQKPGKAPKLLIYYTSRLQSGVPSRFSGSGSGTDFTLTISSLQPEDFATYFCQQGNTWPPTFGQGTKLEIKRTVAAPSVFIFPPDIQMTQSPSSLSASVGDRVTITCRASQLVSSAVAWYQQKPGKAPKLLIYWASARHTGVPSRFSGSGSGTDFTLTISSLQPEDFATYYCQQHYKTPFTFGQGTKLEIKR

SEQ ID NO: 222 - protein, 254 aa, Artificial Sequence
  Description of Artificial Sequence: Synthetic polypeptide
EVQLVQSGAEVKKPGASVKVSCKASGYTFANYGIIWVRQAPGQGLEWMGWINTYTGKPTYAQKFQGRVTMTTDTSTSTAYMELSSLRSEDTAVYYCARKLFTTMDVTDNAMDYWGQGTTVTVSSASTKGPSVFPLAPEVQLVESGGGLVQPGGSLRLSCAASGFTFSNYGVTWVRQAPGKGLEWVSMIWADGSTHYASSVKGRFTISRDNSKNTLYLQMNSLRAEDTAVYYCAREWQHGPVAYWGQGTLVTVSS

SEQ ID NO: 223 - protein, 221 aa, Artificial Sequence; identical to SEQ ID NO: 219
  Description of Artificial Sequence: Synthetic polypeptide

SEQ ID NO: 224 - protein, 257 aa, Artificial Sequence
  Description of Artificial Sequence: Synthetic polypeptide
EVQLVQSGAEVKKPGASVKVSCKASGYTFTTYGVSWVRQAPGQGLEWMGEIYPGNYNTYYNEKFRGRVTMTTDTSTSTAYMELRSLRSDDTAVYYCARWRTSYFSDYGYFDYWGQGTTVTVSSGGGGSGGGGSEVQLVQSGAEVKKPGASVKVSCKASGYTFANYGIIWVRQAPGQGLEWMGWINTYTGKPTYAQKFQGRVTMTTDTSTSTAYMELSSLRSEDTAVYYCARKLFTTMDVTDNAMDYWGQGTTVTVSS

SEQ ID NO: 225 - protein, 230 aa, Artificial Sequence
  Description of Artificial Sequence: Synthetic polypeptide
DVVMTQSPLSLPVTLGQPASISCRSSQSLVHSHGNTYLHWYQQRPGQSPRLLIYTVSNRFSGVPDRFSGSGSGTDFTLKISRVEAEDVGVYYCSQSTHVPYTFGGGTKVEIKRGGSGGGGSGDIQMTQSPSSLSASVGDRVTITCRASQDISQYLNWYQQKPGKAPKLLIYYTSRLQSGVPSRFSGSGSGTDFTLTISSLQPEDFATYFCQQGNTWPPTFGQGTKLEIKR

SEQ ID NO: 226 - protein, 253 aa, Artificial Sequence
  Description of Artificial Sequence: Synthetic polypeptide
EVQLVQSGAEVKKPGASVKVSCKASGYTFTTYGVSWVRQAPGQGLEWMGEIYPGNYNTYYNEKFRGRVTMTTDTSTSTAYMELRSLRSDDTAVYYCARWRTSYFSDYGYFDYWGQGTTVTVSSASTKGPEVQLVQSGAEVKKPGASVKVSCKASGYTFANYGIIWVRQAPGQGLEWMGWINTYTGKPTYAQKFQGRVTMTTDTSTSTAYMELSSLRSEDTAVYYCARKLFTTMDVTDNAMDYWGQGTTVTVSS

SEQ ID NO: 227 - protein, 226 aa, Artificial Sequence
  Description of Artificial Sequence: Synthetic polypeptide
DVVMTQSPLSLPVTLGQPASISCRSSQSLVHSHGNTYLHWYQQRPGQSPRLLIYTVSNRFSGVPDRFSGSGSGTDFTLKISRVEAEDVGVYYCSQSTHVPYTFGGGTKVEIKRTVAAPDIQMTQSPSSLSASVGDRVTITCRASQDISQYLNWYQQKPGKAPKLLIYYTSRLQSGVPSRFSGSGSGTDFTLTISSLQPEDFATYFCQQGNTWPPTFGQGTKLEIKR

SEQ ID NO: 228 - protein, 253 aa, Artificial Sequence; identical to SEQ ID NO: 226
  Description of Artificial Sequence: Synthetic polypeptide

SEQ ID NO: 229 - protein, 233 aa, Artificial Sequence
  Description of Artificial Sequence: Synthetic polypeptide
DVVMTQSPLSLPVTLGQPASISCRSSQSLVHSHGNTYLHWYQQRPGQSPRLLIYTVSNRFSGVPDRFSGSGSGTDFTLKISRVEAEDVGVYYCSQSTHVPYTFGGGTKVEIKRTVAAPSVFIFPPDIQMTQSPSSLSASVGDRVTITCRASQDISQYLNWYQQKPGKAPKLLIYYTSRLQSGVPSRFSGSGSGTDFTLTISSLQPEDFATYFCQQGNTWPPTFGQGTKLEIKR

SEQ ID NO: 230 - protein, 260 aa, Artificial Sequence
  Description of Artificial Sequence: Synthetic polypeptide
EVQLVQSGAEVKKPGASVKVSCKASGYTFTTYGVSWVRQAPGQGLEWMGEIYPGNYNTYYNEKFRGRVTMTTDTSTSTAYMELRSLRSDDTAVYYCARWRTSYFSDYGYFDYWGQGTTVTVSSASTKGPSVFPLAPEVQLVQSGAEVKKPGASVKVSCKASGYTFANYGIIWVRQAPGQGLEWMGWINTYTGKPTYAQKFQGRVTMTTDTSTSTAYMELSSLRSEDTAVYYCARKLFTTMDVTDNAMDYWGQGTTVTVSS

SEQ ID NO: 231 - protein, 226 aa, Artificial Sequence; identical to SEQ ID NO: 227
  Description of Artificial Sequence: Synthetic polypeptide

SEQ ID NO: 232 - protein, 251 aa, Artificial Sequence
  Description of Artificial Sequence: Synthetic polypeptide
EVQLVQSGAEVKKPGASVKVSCKASGYTFNNYGIIWVRQAPGQGLEWMGWINTYTGKPTYAQKFQGRVTMTTDTSTSTAYMELSSLRSEDTAVYYCARKLFNTVAVTDNAMDYWGQGTTVTVSSGGGGSGGGGSEVQLVESGGGLVQPGGSLRLSCAASGFTFSNYGVTWVRQAPGKGLEWVSMIWADGSTHYASSVKGRFTISRDNSKNTLYLQMNSLRAEDTAVYYCAREWQHGPVAYWGQGTLVTVSS

SEQ ID NO: 233 - protein, 225 aa, Artificial Sequence
  Description of Artificial Sequence: Synthetic polypeptide
DIQMTQSPSSLSASVGDRVTITCRASQDIENYLNWYQQKPGKAPKLLIYYTSRLQSGVPSRFSGSGSGTDFTLTISSLQPEDFATYFCQQGNTQPPTFGQGTKLEIKRGGSGGGGSGDIQMTQSPSSLSASVGDRVTITCRASQLVSSAVAWYQQKPGKAPKLLIYWASARHTGVPSRFSGSGSGTDFTLTISSLQPEDFATYYCQQHYKTPFTFGQGTKLEIKR

SEQ ID NO: 234 - protein, 247 aa, Artificial Sequence
  Description of Artificial Sequence: Synthetic polypeptide
EVQLVQSGAEVKKPGASVKVSCKASGYTFNNYGIIWVRQAPGQGLEWMGWINTYTGKPTYAQKFQGRVTMTTDTSTSTAYMELSSLRSEDTAVYYCARKLFNTVAVTDNAMDYWGQGTTVTVSSASTKGPEVQLVESGGGLVQPGGSLRLSCAASGFTFSNYGVTWVRQAPGKGLEWVSMIWADGSTHYASSVKGRFTISRDNSKNTLYLQMNSLRAEDTAVYYCAREWQHGPVAYWGQGTLVTVSS

SEQ ID NO: 235 - protein, 221 aa, Artificial Sequence
  Description of Artificial Sequence: Synthetic polypeptide
DIQMTQSPSSLSASVGDRVTITCRASQDIENYLNWYQQKPGKAPKLLIYYTSRLQSGVPSRFSGSGSGTDFTLTISSLQPEDFATYFCQQGNTQPPTFGQGTKLEIKRTVAAPDIQMTQSPSSLSASVGDRVTITCRASQLVSSAVAWYQQKPGKAPKLLIYWASARHTGVPSRFSGSGSGTDFTLTISSLQPEDFATYYCQQHYKTPFTFGQGTKLEIKR

SEQ ID NO: 236 - protein, 247 aa, Artificial Sequence; identical to SEQ ID NO: 234
  Description of Artificial Sequence: Synthetic polypeptide

SEQ ID NO: 237 - protein, 228 aa, Artificial Sequence
  Description of Artificial Sequence: Synthetic polypeptide
DIQMTQSPSSLSASVGDRVTITCRASQDIENYLNWYQQKPGKAPKLLIYYTSRLQSGVPSRFSGSGSGTDFTLTISSLQPEDFATYFCQQGNTQPPTFGQGTKLEIKRTVAAPSVFIFPPDIQMTQSPSSLSASVGDRVTITCRASQLVSSAVAWYQQKPGKAPKLLIYWASARHTGVPSRFSGSGSGTDFTLTISSLQPEDFATYYCQQHYKTPFTFGQGTKLEIKR

SEQ ID NO: 238 - protein, 254 aa, Artificial Sequence
  Description of Artificial Sequence: Synthetic polypeptide
EVQLVQSGAEVKKPGASVKVSCKASGYTFNNYGIIWVRQAPGQGLEWMGWINTYTGKPTYAQKFQGRVTMTTDTSTSTAYMELSSLRSEDTAVYYCARKLFNTVAVTDNAMDYWGQGTTVTVSSASTKGPSVFPLAPEVQLVESGGGLVQPGGSLRLSCAASGFTFSNYGVTWVRQAPGKGLEWVSMIWADGSTHYASSVKGRFTISRDNSKNTLYLQMNSLRAEDTAVYYCAREWQHGPVAYWGQGTLVTVSS

SEQ ID NO: 239 - protein, 221 aa, Artificial Sequence; identical to SEQ ID NO: 235
  Description of Artificial Sequence: Synthetic polypeptide

SEQ ID NO: 240 - protein, 257 aa, Artificial Sequence
  Description of Artificial Sequence: Synthetic polypeptide
EVQLVQSGAEVKKPGASVKVSCKASGYTFTTYGVSWVRQAPGQGLEWMGEIYPGNYNTYYNEKFRGRVTMTTDTSTSTAYMELRSLRSDDTAVYYCARWRTSYFSDYGYFDYWGQGTTVTVSSGGGGSGGGGSEVQLVQSGAEVKKPGASVKVSCKASGYTFNNYGIIWVRQAPGQGLEWMGWINTYTGKPTYAQKFQGRVTMTTDTSTSTAYMELSSLRSEDTAVYYCARKLFNTVAVTDNAMDYWGQGTTVTVSS

SEQ ID NO: 241 - protein, 230 aa, Artificial Sequence
  Description of Artificial Sequence: Synthetic polypeptide
DVVMTQSPLSLPVTLGQPASISCRSSQSLVHSHGNTYLHWYQQRPGQSPRLLIYTVSNRFSGVPDRFSGSGSGTDFTLKISRVEAEDVGVYYCSQSTHVPYTFGGGTKVEIKRGGSGGGGSGDIQMTQSPSSLSASVGDRVTITCRASQDIENYLNWYQQKPGKAPKLLIYYTSRLQSGVPSRFSGSGSGTDFTLTISSLQPEDFATYFCQQGNTQPPTFGQGTKLEIKR

SEQ ID NO: 242 - protein, 253 aa, Artificial Sequence
  Description of Artificial Sequence: Synthetic polypeptide
EVQLVQSGAEVKKPGASVKVSCKASGYTFTTYGVSWVRQAPGQGLEWMGEIYPGNYNTYYNEKFRGRVTMTTDTSTSTAYMELRSLRSDDTAVYYCARWRTSYFSDYGYFDYWGQGTTVTVSSASTKGPEVQLVQSGAEVKKPGASVKVSCKASGYTFNNYGIIWVRQAPGQGLEWMGWINTYTGKPTYAQKFQGRVTMTTDTSTSTAYMELSSLRSEDTAVYYCARKLFNTVAVTDNAMDYWGQGTTVTVSS

SEQ ID NO: 243 - protein, 226 aa, Artificial Sequence
  Description of Artificial Sequence: Synthetic polypeptide
DVVMTQSPLSLPVTLGQPASISCRSSQSLVHSHGNTYLHWYQQRPGQSPRLLIYTVSNRFSGVPDRFSGSGSGTDFTLKISRVEAEDVGVYYCSQSTHVPYTFGGGTKVEIKRTVAAPDIQMTQSPSSLSASVGDRVTITCRASQDIENYLNWYQQKPGKAPKLLIYYTSRLQSGVPSRFSGSGSGTDFTLTISSLQPEDFATYFCQQGNTQPPTFGQGTKLEIKR

SEQ ID NO: 244 - protein, 253 aa, Artificial Sequence; identical to SEQ ID NO: 242
  Description of Artificial Sequence: Synthetic polypeptide

SEQ ID NO: 245 - protein, 233 aa, Artificial Sequence
  Description of Artificial Sequence: Synthetic polypeptide
DVVMTQSPLSLPVTLGQPASISCRSSQSLVHSHGNTYLHWYQQRPGQSPRLLIYTVSNRFSGVPDRFSGSGSGTDFTLKISRVEAEDVGVYYCSQSTHVPYTFGGGTKVEIKRTVAAPSVFIFPPDIQMTQSPSSLSASVGDRVTITCRASQDIENYLNWYQQKPGKAPKLLIYYTSRLQSGVPSRFSGSGSGTDFTLTISSLQPEDFATYFCQQGNTQPPTFGQGTKLEIKR

SEQ ID NO: 246 - protein, 260 aa, Artificial Sequence
  Description of Artificial Sequence: Synthetic polypeptide
EVQLVQSGAEVKKPGASVKVSCKASGYTFTTYGVSWVRQAPGQGLEWMGEIYPGNYNTYYNEKFRGRVTMTTDTSTSTAYMELRSLRSDDTAVYYCARWRTSYFSDYGYFDYWGQGTTVTVSSASTKGPSVFPLAPEVQLVQSGAEVKKPGASVKVSCKASGYTFNNYGIIWVRQAPGQGLEWMGWINTYTGKPTYAQKFQGRVTMTTDTSTSTAYMELSSLRSEDTAVYYCARKLFNTVAVTDNAMDYWGQGTTVTVSS

SEQ ID NO: 247 - protein, 226 aa, Artificial Sequence; identical to SEQ ID NO: 243
  Description of Artificial Sequence: Synthetic polypeptide

SEQ ID NO: 248 - protein, 246 aa, Artificial Sequence
  Description of Artificial Sequence: Synthetic polypeptide
EVQLVESGGGLVQPGGSLRLSCAASGFTFSNYGVTWVRQAPGKGLEWVSMIWADGSTHYASSVKGRFTISRDNSKNTLYLQMNSLRAEDTAVYYCAREWQHGPVAYWGQGTLVTVSSGGGGSGGGGSEVQLVQSGAEVKKPGASVKVSCKASGYTFTSYWMHWVRQAPGQGLEWIGNINPKGGSNIYNEKFQGRVTMTRDTSISTAYMELSRLRSDDTAVYYCARLDYFGDSFDLWGQGTTVTVSS

SEQ ID NO: 249 - protein, 225 aa, Artificial Sequence
  Description of Artificial Sequence: Synthetic polypeptide
DIQMTQSPSSLSASVGDRVTITCRASQLVSSAVAWYQQKPGKAPKLLIYWASARHTGVPSRFSGSGSGTDFTLTISSLQPEDFATYYCQQHYKTPFTFGQGTKLEIKRGGSGGGGSGDIQMTQSPSSLSASVGDRVTITCRASQGIRNYLNWYQQKPGKAPKLLIYYASNLEVGVPSRFSGSGSGTDYTLTISSLQPEDFATYYCQQDNRFPYTFGGGTKVEIKR

SEQ ID NO: 250 - protein, 242 aa, Artificial Sequence
  Description of Artificial Sequence: Synthetic polypeptide
EVQLVESGGGLVQPGGSLRLSCAASGFTFSNYGVTWVRQAPGKGLEWVSMIWADGSTHYASSVKGRFTISRDNSKNTLYLQMNSLRAEDTAVYYCAREWQHGPVAYWGQGTLVTVSSASTKGPEVQLVQSGAEVKKPGASVKVSCKASGYTFTSYWMHWVRQAPGQGLEWIGNINPKGGSNIYNEKFQGRVTMTRDTSISTAYMELSRLRSDDTAVYYCARLDYFGDSFDLWGQGTTVTVSS

SEQ ID NO: 251 - protein, 221 aa, Artificial Sequence
  Description of Artificial Sequence: Synthetic polypeptide
DIQMTQSPSSLSASVGDRVTITCRASQLVSSAVAWYQQKPGKAPKLLIYWASARHTGVPSRFSGSGSGTDFTLTISSLQPEDFATYYCQQHYKTPFTFGQGTKLEIKRTVAAPDIQMTQSPSSLSASVGDRVTITCRASQGIRNYLNWYQQKPGKAPKLLIYYASNLEVGVPSRFSGSGSGTDYTLTISSLQPEDFATYYCQQDNRFPYTFGGGTKVEIKR

SEQ ID NO: 252 - protein, 242 aa, Artificial Sequence; identical to SEQ ID NO: 250
  Description of Artificial Sequence: Synthetic polypeptide

SEQ ID NO: 253 - protein, 228 aa, Artificial Sequence
  Description of Artificial Sequence: Synthetic polypeptide
DIQMTQSPSSLSASVGDRVTITCRASQLVSSAVAWYQQKPGKAPKLLIYWASARHTGVPSRFSGSGSGTDFTLTISSLQPEDFATYYCQQHYKTPFTFGQGTKLEIKRTVAAPSVFIFPPDIQMTQSPSSLSASVGDRVTITCRASQGIRNYLNWYQQKPGKAPKLLIYYASNLEVGVPSRFSGSGSGTDYTLTISSLQPEDFATYYCQQDNRFPYTFGGGTKVEIKR

SEQ ID NO: 254 - protein, 249 aa, Artificial Sequence
  Description of Artificial Sequence: Synthetic polypeptide
EVQLVESGGGLVQPGGSLRLSCAASGFTFSNYGVTWVRQAPGKGLEWVSMIWADGSTHYASSVKGRFTISRDNSKNTLYLQMNSLRAEDTAVYYCAREWQHGPVAYWGQGTLVTVSSASTKGPSVFPLAPEVQLVQSGAEVKKPGASVKVSCKASGYTFTSYWMHWVRQAPGQGLEWIGNINPKGGSNIYNEKFQGRVTMTRDTSISTAYMELSRLRSDDTAVYYCARLDYFGDSFDLWGQGTTVTVSS

SEQ ID NO: 255 - protein, 221 aa, Artificial Sequence; identical to SEQ ID NO: 251
  Description of Artificial Sequence: Synthetic polypeptide

SEQ ID NO: 256 - protein, 246 aa, Artificial Sequence
  Description of Artificial Sequence: Synthetic polypeptide
EVQLVESGGGLVQPGGSLRLSCAASGFTFSNYGVEWVRQAPGKGLEWVSGIWADGSTHYADTVKSRFTISRDNSKNTLYLQMNSLRAEDTAVYYCAREWQHGPVAYWGQGTLVTVSSGGGGSGGGGSEVQLVQSGAEVKKPGASVKVSCKASGYTFTSYWMHWVRQAPGQGLEWIGNINPKGGSNIYNEKFQGRVTMTRDTSISTAYMELSRLRSDDTAVYYCARLDYFGDSFDLWGQGTTVTVSS

SEQ ID NO: 257 - protein, 225 aa, Artificial Sequence
  Description of Artificial Sequence: Synthetic polypeptide
DIQMTQSPSSLSASVGDRVTITCKASQLVSSAVAWYQQKPGKAPKLLIYWASTLHTGVPSRFSGSGSGTDFTLTISSLQPEDFATYYCQQHYRTPFTFGQGTKLEIKRGGSGGGGSGDIQMTQSPSSLSASVGDRVTITCRASQGIRNYLNWYQQKPGKAPKLLIYYASNLEVGVPSRFSGSGSGTDYTLTISSLQPEDFATYYCQQDNRFPYTFGGGTKVEIKR

SEQ ID NO: 258 - protein, 242 aa, Artificial Sequence
  Description of Artificial Sequence: Synthetic polypeptide
EVQLVESGGGLVQPGGSLRLSCAASGFTFSNYGVEWVRQAPGKGLEWVSGIWADGSTHYADTVKSRFTISRDNSKNTLYLQMNSLRAEDTAVYYCAREWQHGPVAYWGQGTLVTVSSASTKGPEVQLVQSGAEVKKPGASVKVSCKASGYTFTSYWMHWVRQAPGQGLEWIGNINPKGGSNIYNEKFQGRVTMTRDTSISTAYMELSRLRSDDTAVYYCARLDYFGDSFDLWGQGTTVTVSS

SEQ ID NO: 259 - protein, 221 aa, Artificial Sequence
  Description of Artificial Sequence: Synthetic polypeptide
DIQMTQSPSSLSASVGDRVTITCKASQLVSSAVAWYQQKPGKAPKLLIYWASTLHTGVPSRFSGSGSGTDFTLTISSLQPEDFATYYCQQHYRTPFTFGQGTKLEIKRTVAAPDIQMTQSPSSLSASVGDRVTITCRASQGIRNYLNWYQQKPGKAPKLLIYYASNLEVGVPSRFSGSGSGTDYTLTISSLQPEDFATYYCQQDNRFPYTFGGGTKVEIKR

SEQ ID NO: 260 - protein, 242 aa, Artificial Sequence; identical to SEQ ID NO: 258
  Description of Artificial Sequence: Synthetic polypeptide

SEQ ID NO: 261 - protein, 228 aa, Artificial Sequence
  Description of Artificial Sequence: Synthetic polypeptide
DIQMTQSPSSLSASVGDRVTITCKASQLVSSAVAWYQQKPGKAPKLLIYWASTLHTGVPSRFSGSGSGTDFTLTISSLQPEDFATYYCQQHYRTPFTFGQGTKLEIKRTVAAPSVFIFPPDIQMTQSPSSLSASVGDRVTITCRASQGIRNYLNWYQQKPGKAPKLLIYYASNLEVGVPSRFSGSGSGTDYTLTISSLQPEDFATYYCQQDNRFPYTFGGGTKVEIKR

SEQ ID NO: 262 - protein, 249 aa, Artificial Sequence
  Description of Artificial Sequence: Synthetic polypeptide
EVQLVESGGGLVQPGGSLRLSCAASGFTFSNYGVEWVRQAPGKGLEWVSGIWADGSTHYADTVKSRFTISRDNSKNTLYLQMNSLRAEDTAVYYCAREWQHGPVAYWGQGTLVTVSSASTKGPSVFPLAPEVQLVQSGAEVKKPGASVKVSCKASGYTFTSYWMHWVRQAPGQGLEWIGNINPKGGSNIYNEKFQGRVTMTRDTSISTAYMELSRLRSDDTAVYYCARLDYFGDSFDLWGQGTTVTVSS

SEQ ID NO: 263 - protein, 221 aa, Artificial Sequence; identical to SEQ ID NO: 259
  Description of Artificial Sequence: Synthetic polypeptide

SEQ ID NO: 264 - protein, 246 aa, Artificial Sequence
  Description of Artificial Sequence: Synthetic polypeptide
EVQLVQSGAEVKKPGASVKVSCKASGYTFTSYWMHWVRQAPGQGLEWIGNINPKGGSNIYNEKFQGRVTMTRDTSISTAYMELSRLRSDDTAVYYCARLDYFGDSFDLWGQGTTVTVSSGGGGSGGGGSEVQLVESGGGLVQPGGSLRLSCAASGFTFSNYGVEWVRQAPGKGLEWVSGIWADGSTHYADTVKSRFTISRDNSKNTLYLQMNSLRAEDTAVYYCAREWQHGPVAYWGQGTLVTVSS

SEQ ID NO: 265 - protein, 225 aa, Artificial Sequence
  Description of Artificial Sequence: Synthetic polypeptide
DIQMTQSPSSLSASVGDRVTITCRASQGIRNYLNWYQQKPGKAPKLLIYYASNLEVGVPSRFSGSGSGTDYTLTISSLQPEDFATYYCQQDNRFPYTFGGGTKVEIKRGGSGGGGSGDIQMTQSPSSLSASVGDRVTITCKASQLVSSAVAWYQQKPGKAPKLLIYWASTLHTGVPSRFSGSGSGTDFTLTISSLQPEDFATYYCQQHYRTPFTFGQGTKLEIKR

SEQ ID NO: 266 - protein, 242 aa, Artificial Sequence
  Description of Artificial Sequence: Synthetic polypeptide
EVQLVQSGAEVKKPGASVKVSCKASGYTFTSYWMHWVRQAPGQGLEWIGNINPKGGSNIYNEKFQGRVTMTRDTSISTAYMELSRLRSDDTAVYYCARLDYFGDSFDLWGQGTTVTVSSASTKGPEVQLVESGGGLVQPGGSLRLSCAASGFTFSNYGVEWVRQAPGKGLEWVSGIWADGSTHYADTVKSRFTISRDNSKNTLYLQMNSLRAEDTAVYYCAREWQHGPVAYWGQGTLVTVSS

SEQ ID NO: 267 - protein, 221 aa, Artificial Sequence
  Description of Artificial Sequence: Synthetic polypeptide
DIQMTQSPSSLSASVGDRVTITCRASQGIRNYLNWYQQKPGKAPKLLIYYASNLEVGVPSRFSGSGSGTDYTLTISSLQPEDFATYYCQQDNRFPYTFGGGTKVEIKRTVAAPDIQMTQSPSSLSASVGDRVTITCKASQLVSSAVAWYQQKPGKAPKLLIYWASTLHTGVPSRFSGSGSGTDFTLTISSLQPEDFATYYCQQHYRTPFTFGQGTKLEIKR

SEQ ID NO: 268 - protein, 253 aa, Artificial Sequence
  Description of Artificial Sequence: Synthetic polypeptide
EVQLVQSGAEVKKPGASVKVSCKASGYTFANYGIIWVRQAPGQGLEWMGWINTYTGKPTYAQKFQGRVTMTTDTSTSTAYMELSSLRSEDTAVYYCARKLFTTMDVTDNAMDYWGQGTTVTVSSGGGGSGGGGSEVQLVQSGAEVKKPGASVKVSCKASGYTFTSYWMHWVRQAPGQGLEWIGNINPKGGSNIYNEKFQGRVTMTRDTSISTAYMELSRLRSDDTAVYYCARLDYFGDSFDLWGQGTTVTVSS

SEQ ID NO: 269 - protein, 225 aa, Artificial Sequence
  Description of Artificial Sequence: Synthetic polypeptide
DIQMTQSPSSLSASVGDRVTITCRASQDISQYLNWYQQKPGKAPKLLIYYTSRLQSGVPSRFSGSGSGTDFTLTISSLQPEDFATYFCQQGNTWPPTFGQGTKLEIKRGGSGGGGSGDIQMTQSPSSLSASVGDRVTITCRASQGIRNYLNWYQQKPGKAPKLLIYYASNLEVGVPSRFSGSGSGTDYTLTISSLQPEDFATYYCQQDNRFPYTFGGGTKVEIKR

SEQ ID NO: 270 - protein, 249 aa, Artificial Sequence
  Description of Artificial Sequence: Synthetic polypeptide
EVQLVQSGAEVKKPGASVKVSCKASGYTFANYGIIWVRQAPGQGLEWMGWINTYTGKPTYAQKFQGRVTMTTDTSTSTAYMELSSLRSEDTAVYYCARKLFTTMDVTDNAMDYWGQGTTVTVSSASTKGPEVQLVQSGAEVKKPGASVKVSCKASGYTFTSYWMHWVRQAPGQGLEWIGNINPKGGSNIYNEKFQGRVTMTRDTSISTAYMELSRLRSDDTAVYYCARLDYFGDSFDLWGQGTTVTVSS

SEQ ID NO: 271 - protein, 221 aa, Artificial Sequence
  Description of Artificial Sequence: Synthetic polypeptide
DIQMTQSPSSLSASVGDRVTITCRASQDISQYLNWYQQKPGKAPKLLIYYTSRLQSGVPSRFSGSGSGTDFTLTISSLQPEDFATYFCQQGNTWPPTFGQGTKLEIKRTVAAPDIQMTQSPSSLSASVGDRVTITCRASQGIRNYLNWYQQKPGKAPKLLIYYASNLEVGVPSRFSGSGSGTDYTLTISSLQPEDFATYYCQQDNRFPYTFGGGTKVEIKR

SEQ ID NO: 272 - protein, 249 aa, Artificial Sequence; identical to SEQ ID NO: 270
  Description of Artificial Sequence: Synthetic polypeptide

SEQ ID NO: 273 - protein, 228 aa, Artificial Sequence
  Description of Artificial Sequence: Synthetic polypeptide
DIQMTQSPSSLSASVGDRVTITCRASQDISQYLNWYQQKPGKAPKLLIYYTSRLQSGVPSRFSGSGSGTDFTLTISSLQPEDFATYFCQQGNTWPPTFGQGTKLEIKRTVAAPSVFIFPPDIQMTQSPSSLSASVGDRVTITCRASQGIRNYLNWYQQKPGKAPKLLIYYASNLEVGVPSRFSGSGSGTDYTLTISSLQPEDFATYYCQQDNRFPYTFGGGTKVEIKR

SEQ ID NO: 274 - protein, 256 aa, Artificial Sequence
  Description of Artificial Sequence: Synthetic polypeptide
EVQLVQSGAEVKKPGASVKVSCKASGYTFANYGIIWVRQAPGQGLEWMGWINTYTGKPTYAQKFQGRVTMTTDTSTSTAYMELSSLRSEDTAVYYCARKLFTTMDVTDNAMDYWGQGTTVTVSSASTKGPSVFPLAPEVQLVQSGAEVKKPGASVKVSCKASGYTFTSYWMHWVRQAPGQGLEWIGNINPKGGSNIYNEKFQGRVTMTRDTSISTAYMELSRLRSDDTAVYYCARLDYFGDSFDLWGQGTTVTVSS

SEQ ID NO: 275 - protein, 221 aa, Artificial Sequence; identical to SEQ ID NO: 271
  Description of Artificial Sequence: Synthetic polypeptide

SEQ ID NO: 276 - protein, 253 aa, Artificial Sequence
  Description of Artificial Sequence: Synthetic polypeptide
EVQLVQSGAEVKKPGASVKVSCKASGYTFTSYWMHWVRQAPGQGLEWIGNINPKGGSNIYNEKFQGRVTMTRDTSISTAYMELSRLRSDDTAVYYCARLDYFGDSFDLWGQGTTVTVSSGGGGSGGGGSEVQLVQSGAEVKKPGASVKVSCKASGYTFANYGIIWVRQAPGQGLEWMGWINTYTGKPTYAQKFQGRVTMTTDTSTSTAYMELSSLRSEDTAVYYCARKLFTTMDVTDNAMDYWGQGTTVTVSS

SEQ ID NO: 277 - protein, 225 aa, Artificial Sequence
  Description of Artificial Sequence: Synthetic polypeptide
DIQMTQSPSSLSASVGDRVTITCRASQGIRNYLNWYQQKPGKAPKLLIYYASNLEVGVPSRFSGSGSGTDYTLTISSLQPEDFATYYCQQDNRFPYTFGGGTKVEIKRGGSGGGGSGDIQMTQSPSSLSASVGDRVTITCRASQDISQYLNWYQQKPGKAPKLLIYYTSRLQSGVPSRFSGSGSGTDFTLTISSLQPEDFATYFCQQGNTWPPTFGQGTKLEIKR

SEQ ID NO: 278 - protein, 249 aa, Artificial Sequence
  Description of Artificial Sequence: Synthetic polypeptide
EVQLVQSGAEVKKPGASVKVSCKASGYTFTSYWMHWVRQAPGQGLEWIGNINPKGGSNIYNEKFQGRVTMTRDTSISTAYMELSRLRSDDTAVYYCARLDYFGDSFDLWGQGTTVTVSSASTKGPEVQLVQSGAEVKKPGASVKVSCKASGYTFANYGIIWVRQAPGQGLEWMGWINTYTGKPTYAQKFQGRVTMTTDTSTSTAYMELSSLRSEDTAVYYCARKLFTTMDVTDNAMDYWGQGTTVTVSS

SEQ ID NO: 279 - protein, 221 aa, Artificial Sequence
  Description of Artificial Sequence: Synthetic polypeptide
DIQMTQSPSSLSASVGDRVTITCRASQGIRNYLNWYQQKPGKAPKLLIYYASNLEVGVPSRFSGSGSGTDYTLTISSLQPEDFATYYCQQDNRFPYTFGGGTKVEIKRTVAAPDIQMTQSPSSLSASVGDRVTITCRASQDISQYLNWYQQKPGKAPKLLIYYTSRLQSGVPSRFSGSGSGTDFTLTISSLQPEDFATYFCQQGNTWPPTFGQGTKLEIKR

SEQ ID NO: 280 - protein, 253 aa, Artificial Sequence
  Description of Artificial Sequence: Synthetic polypeptide
EVQLVQSGAEVKKPGASVKVSCKASGYTFNNYGIIWVRQAPGQGLEWMGWINTYTGKPTYAQKFQGRVTMTTDTSTSTAYMELSSLRSEDTAVYYCARKLFNTVAVTDNAMDYWGQGTTVTVSSGGGGSGGGGSEVQLVQSGAEVKKPGASVKVSCKASGYTFTSYWMHWVRQAPGQGLEWIGNINPKGGSNIYNEKFQGRVTMTRDTSISTAYMELSRLRSDDTAVYYCARLDYFGDSFDLWGQGTTVTVSS

SEQ ID NO: 281 - protein, 225 aa, Artificial Sequence
  Description of Artificial Sequence: Synthetic polypeptide
DIQMTQSPSSLSASVGDRVTITCRASQDIENYLNWYQQKPGKAPKLLIYYTSRLQSGVPSRFSGSGSGTDFTLTISSLQPEDFATYFCQQGNTQPPTFGQGTKLEIKRGGSGGGGSGDIQMTQSPSSLSASVGDRVTITCRASQGIRNYLNWYQQKPGKAPKLLIYYASNLEVGVPSRFSGSGSGTDYTLTISSLQPEDFATYYCQQDNRFPYTFGGGTKVEIKR

SEQ ID NO: 282 - protein, 249 aa, Artificial Sequence
  Description of Artificial Sequence: Synthetic polypeptide
EVQLVQSGAEVKKPGASVKVSCKASGYTFNNYGIIWVRQAPGQGLEWMGWINTYTGKPTYAQKFQGRVTMTTDTSTSTAYMELSSLRSEDTAVYYCARKLFNTVAVTDNAMDYWGQGTTVTVSSASTKGPEVQLVQSGAEVKKPGASVKVSCKASGYTFTSYWMHWVRQAPGQGLEWIGNINPKGGSNIYNEKFQGRVTMTRDTSISTAYMELSRLRSDDTAVYYCARLDYFGDSFDLWGQGTTVTVSS

SEQ ID NO: 283 - protein, 221 aa, Artificial Sequence
  Description of Artificial Sequence: Synthetic polypeptide
DIQMTQSPSSLSASVGDRVTITCRASQDIENYLNWYQQKPGKAPKLLIYYTSRLQSGVPSRFSGSGSGTDFTLTISSLQPEDFATYFCQQGNTQPPTFGQGTKLEIKRTVAAPDIQMTQSPSSLSASVGDRVTITCRASQGIRNYLNWYQQKPGKAPKLLIYYASNLEVGVPSRFSGSGSGTDYTLTISSLQPEDFATYYCQQDNRFPYTFGGGTKVEIKR

SEQ ID NO: 284 - protein, 249 aa, Artificial Sequence; identical to SEQ ID NO: 282
  Description of Artificial Sequence: Synthetic polypeptide

SEQ ID NO: 285 - protein, 228 aa, Artificial Sequence
  Description of Artificial Sequence: Synthetic polypeptide
DIQMTQSPSSLSASVGDRVTITCRASQDIENYLNWYQQKPGKAPKLLIYYTSRLQSGVPSRFSGSGSGTDFTLTISSLQPEDFATYFCQQGNTQPPTFGQGTKLEIKRTVAAPSVFIFPPDIQMTQSPSSLSASVGDRVTITCRASQGIRNYLNWYQQKPGKAPKLLIYYASNLEVGVPSRFSGSGSGTDYTLTISSLQPEDFATYYCQQDNRFPYTFGGGTKVEIKR

SEQ ID NO: 286 - protein, 256 aa, Artificial Sequence
  Description of Artificial Sequence: Synthetic polypeptide
EVQLVQSGAEVKKPGASVKVSCKASGYTFNNYGIIWVRQAPGQGLEWMGWINTYTGKPTYAQKFQGRVTMTTDTSTSTAYMELSSLRSEDTAVYYCARKLFNTVAVTDNAMDYWGQGTTVTVSSASTKGPSVFPLAPEVQLVQSGAEVKKPGASVKVSCKASGYTFTSYWMHWVRQAPGQGLEWIGNINPKGGSNIYNEKFQGRVTMTRDTSISTAYMELSRLRSDDTAVYYCARLDYFGDSFDLWGQGTTVTVSS

SEQ ID NO: 287 - protein, 221 aa, Artificial Sequence; identical to SEQ ID NO: 283
  Description of Artificial Sequence: Synthetic polypeptide

SEQ ID NO: 288 - protein, 243 aa, Artificial Sequence
  Description of Artificial Sequence: Synthetic polypeptide
EVQLVESGGGLVQPGGSLRLSCAASGFTFSNYGVTWVRQAPGKGLEWVSMIWADGSTHYASSVKGRFTISRDNSKNTLYLQMNSLRAEDTAVYYCAREWQHGPVAYWGQGTLVTVSSGGGGSGGGGSEVQLVQSGAEVKKPGASVKVSCKASGYTFTKYWLGWVRQAPGQGLEWMGDIYPGYDYTHYNEKFKDRVTLTTDTSTSTAYMELRSLRSDDTAVYYCARSDGSSTYWGQGTLVTVSS

SEQ ID NO: 289 - protein, 230 aa, Artificial Sequence
  Description of Artificial Sequence: Synthetic polypeptide
DIQMTQSPSSLSASVGDRVTITCRASQLVSSAVAWYQQKPGKAPKLLIYWASARHTGVPSRFSGSGSGTDFTLTISSLQPEDFATYYCQQHYKTPFTFGQGTKLEIKRGGSGGGGSGDVLMTQTPLSLPVTPGEPASISCTSSQNIVHSNGNTYLEWYLQKPGQSPQLLIYKVSNRFSGVPDRFSGSGSGTDFTLKISRVEAEDVGVYYCFQVSHVPYTFGGGTKVEIKR

SEQ ID NO: 290 - protein, 239 aa, Artificial Sequence
  Description of Artificial Sequence: Synthetic polypeptide
EVQLVESGGGLVQPGGSLRLSCAASGFTFSNYGVTWVRQAPGKGLEWVSMIWADGSTHYASSVKGRFTISRDNSKNTLYLQMNSLRAEDTAVYYCAREWQHGPVAYWGQGTLVTVSSASTKGPEVQLVQSGAEVKKPGASVKVSCKASGYTFTKYWLGWVRQAPGQGLEWMGDIYPGYDYTHYNEKFKDRVTLTTDTSTSTAYMELRSLRSDDTAVYYCARSDGSSTYWGQGTLVTVSS

SEQ ID NO: 291 - protein, 226 aa, Artificial Sequence
  Description of Artificial Sequence: Synthetic polypeptide
DIQMTQSPSSLSASVGDRVTITCRASQLVSSAVAWYQQKPGKAPKLLIYWASARHTGVPSRFSGSGSGTDFTLTISSLQPEDFATYYCQQHYKTPFTFGQGTKLEIKRTVAAPDVLMTQTPLSLPVTPGEPASISCTSSQNIVHSNGNTYLEWYLQKPGQSPQLLIYKVSNRFSGVPDRFSGSGSGTDFTLKISRVEAEDVGVYYCFQVSHVPYTFGGGTKVEIKR

SEQ ID NO: 292 - protein, 239 aa, Artificial Sequence; identical to SEQ ID NO: 290
  Description of Artificial Sequence: Synthetic polypeptide

SEQ ID NO: 293 - protein, 233 aa, Artificial Sequence
  Description of Artificial Sequence: Synthetic polypeptide
DIQMTQSPSSLSASVGDRVTITCRASQLVSSAVAWYQQKPGKAPKLLIYWASARHTGVPSRFSGSGSGTDFTLTISSLQPEDFATYYCQQHYKTPFTFGQGTKLEIKRTVAAPSVFIFPPDVLMTQTPLSLPVTPGEPASISCTSSQNIVHSNGNTYLEWYLQKPGQSPQLLIYKVSNRFSGVPDRFSGSGSGTDFTLKISRVEAEDVGVYYCFQVSHVPYTFGGGTKVEIKR

SEQ ID NO: 294 - protein, 246 aa, Artificial Sequence
  Description of Artificial Sequence: Synthetic polypeptide
EVQLVESGGGLVQPGGSLRLSCAASGFTFSNYGVTWVRQAPGKGLEWVSMIWADGSTHYASSVKGRFTISRDNSKNTLYLQMNSLRAEDTAVYYCAREWQHGPVAYWGQGTLVTVSSASTKGPSVFPLAPEVQLVQSGAEVKKPGASVKVSCKASGYTFTKYWLGWVRQAPGQGLEWMGDIYPGYDYTHYNEKFKDRVTLTTDTSTSTAYMELRSLRSDDTAVYYCARSDGSSTYWGQGTLVTVSS

SEQ ID NO: 295 - protein, 226 aa, Artificial Sequence; identical to SEQ ID NO: 291
  Description of Artificial Sequence: Synthetic polypeptide

SEQ ID NO: 296 - protein, 243 aa, Artificial Sequence
  Description of Artificial Sequence: Synthetic polypeptide
EVQLVQSGAEVKKPGASVKVSCKASGYTFTKYWLGWVRQAPGQGLEWMGDIYPGYDYTHYNEKFKDRVTLTTDTSTSTAYMELRSLRSDDTAVYYCARSDGSSTYWGQGTLVTVSSGGGGSGGGGSEVQLVESGGGLVQPGGSLRLSCAASGFTFSNYGVTWVRQAPGKGLEWVSMIWADGSTHYASSVKGRFTISRDNSKNTLYLQMNSLRAEDTAVYYCAREWQHGPVAYWGQGTLVTVSS

SEQ ID NO: 297 - protein, 230 aa, Artificial Sequence
  Description of Artificial Sequence: Synthetic polypeptide
DVLMTQTPLSLPVTPGEPASISCTSSQNIVHSNGNTYLEWYLQKPGQSPQLLIYKVSNRFSGVPDRFSGSGSGTDFTLKISRVEAEDVGVYYCFQVSHVPYTFGGGTKVEIKRGGSGGGGSGDIQMTQSPSSLSASVGDRVTITCRASQLVSSAVAWYQQKPGKAPKLLIYWASARHTGVPSRFSGSGSGTDFTLTISSLQPEDFATYYCQQHYKTPFTFGQGTKLEIKR

SEQ ID NO: 298 - protein, 239 aa, Artificial Sequence
  Description of Artificial Sequence: Synthetic polypeptide
EVQLVQSGAEVKKPGASVKVSCKASGYTFTKYWLGWVRQAPGQGLEWMGDIYPGYDYTHYNEKFKDRVTLTTDTSTSTAYMELRSLRSDDTAVYYCARSDGSSTYWGQGTLVTVSSASTKGPEVQLVESGGGLVQPGGSLRLSCAASGFTFSNYGVTWVRQAPGKGLEWVSMIWADGSTHYASSVKGRFTISRDNSKNTLYLQMNSLRAEDTAVYYCAREWQHGPVAYWGQGTLVTVSS

SEQ ID NO: 299 - protein, 226 aa, Artificial Sequence
  Description of Artificial Sequence: Synthetic polypeptide
DVLMTQTPLSLPVTPGEPASISCTSSQNIVHSNGNTYLEWYLQKPGQSPQLLIYKVSNRFSGVPDRFSGSGSGTDFTLKISRVEAEDVGVYYCFQVSHVPYTFGGGTKVEIKRTVAAPDIQMTQSPSSLSASVGDRVTITCRASQLVSSAVAWYQQKPGKAPKLLIYWASARHTGVPSRFSGSGSGTDFTLTISSLQPEDFATYYCQQHYKTPFTFGQGTKLEIKR

SEQ ID NO: 300 - protein, 239 aa, Artificial Sequence; identical to SEQ ID NO: 298
  Description of Artificial Sequence: Synthetic polypeptide

SEQ ID NO: 301 - protein, 233 aa, Artificial Sequence
  Description of Artificial Sequence: Synthetic polypeptide
DVLMTQTPLSLPVTPGEPASISCTSSQNIVHSNGNTYLEWYLQKPGQSPQLLIYKVSNRFSGVPDRFSGSGSGTDFTLKISRVEAEDVGVYYCFQVSHVPYTFGGGTKVEIKRTVAAPSVFIFPPDIQMTQSPSSLSASVGDRVTITCRASQLVSSAVAWYQQKPGKAPKLLIYWASARHTGVPSRFSGSGSGTDFTLTISSLQPEDFATYYCQQHYKTPFTFGQGTKLEIKR

SEQ ID NO: 302 - protein, 246 aa, Artificial Sequence
  Description of Artificial Sequence: Synthetic polypeptide
EVQLVQSGAEVKKPGASVKVSCKASGYTFTKYWLGWVRQAPGQGLEWMGDIYPGYDYTHYNEKFKDRVTLTTDTSTSTAYMELRSLRSDDTAVYYCARSDGSSTYWGQGTLVTVSSASTKGPSVFPLAPEVQLVESGGGLVQPGGSLRLSCAASGFTFSNYGVTWVRQAPGKGLEWVSMIWADGSTHYASSVKGRFTISRDNSKNTLYLQMNSLRAEDTAVYYCAREWQHGPVAYWGQGTLVTVSS

SEQ ID NO: 303 - protein, 226 aa, Artificial Sequence; identical to SEQ ID NO: 299
  Description of Artificial Sequence: Synthetic polypeptide

SEQ ID NO: 304 - protein, 243 aa, Artificial Sequence
  Description of Artificial Sequence: Synthetic polypeptide
EVQLVESGGGLVQPGGSLRLSCAASGFTFSNYGVEWVRQAPGKGLEWVSGIWADGSTHYADTVKSRFTISRDNSKNTLYLQMNSLRAEDTAVYYCAREWQHGPVAYWGQGTLVTVSSGGGGSGGGGSEVQLVQSGAEVKKPGASVKVSCKASGYTFTKYWLGWVRQAPGQGLEWMGDIYPGYDYTHYNEKFKDRVTLTTDTSTSTAYMELRSLRSDDTAVYYCARSDGSSTYWGQGTLVTVSS

SEQ ID NO: 305 - protein, 230 aa, Artificial Sequence
  Description of Artificial Sequence: Synthetic polypeptide
DIQMTQSPSSLSASVGDRVTITCKASQLVSSAVAWYQQKPGKAPKLLIYWASTLHTGVPSRFSGSGSGTDFTLTISSLQPEDFATYYCQQHYRTPFTFGQGTKLEIKRGGSGGGGSGDVLMTQTPLSLPVTPGEPASISCTSSQNIVHSNGNTYLEWYLQKPGQSPQLLIYKVSNRFSGVPDRFSGSGSGTDFTLKISRVEAEDVGVYYCFQVSHVPYTFGGGTKVEIKR

SEQ ID NO: 306 - protein, 239 aa, Artificial Sequence
  Description of Artificial Sequence: Synthetic polypeptide
EVQLVESGGGLVQPGGSLRLSCAASGFTFSNYGVEWVRQAPGKGLEWVSGIWADGSTHYADTVKSRFTISRDNSKNTLYLQMNSLRAEDTAVYYCAREWQHGPVAYWGQGTLVTVSSASTKGPEVQLVQSGAEVKKPGASVKVSCKASGYTFTKYWLGWVRQAPGQGLEWMGDIYPGYDYTHYNEKFKDRVTLTTDTSTSTAYMELRSLRSDDTAVYYCARSDGSSTYWGQGTLVTVSS

SEQ ID NO: 307 - protein, 226 aa, Artificial Sequence
  Description of Artificial Sequence: Synthetic polypeptide
DIQMTQSPSSLSASVGDRVTITCKASQLVSSAVAWYQQKPGKAPKLLIYWASTLHTGVPSRFSGSGSGTDFTLTISSLQPEDFATYYCQQHYRTPFTFGQGTKLEIKRTVAAPDVLMTQTPLSLPVTPGEPASISCTSSQNIVHSNGNTYLEWYLQKPGQSPQLLIYKVSNRFSGVPDRFSGSGSGTDFTLKISRVEAEDVGVYYCFQVSHVPYTFGGGTKVEIKR

SEQ ID NO: 308 - protein, 239 aa, Artificial Sequence; identical to SEQ ID NO: 306
  Description of Artificial Sequence: Synthetic polypeptide

SEQ ID NO: 309 - protein, 233 aa, Artificial Sequence
  Description of Artificial Sequence: Synthetic polypeptide
DIQMTQSPSSLSASVGDRVTITCKASQLVSSAVAWYQQKPGKAPKLLIYWASTLHTGVPSRFSGSGSGTDFTLTISSLQPEDFATYYCQQHYRTPFTFGQGTKLEIKRTVAAPSVFIFPPDVLMTQTPLSLPVTPGEPASISCTSSQNIVHSNGNTYLEWYLQKPGQSPQLLIYKVSNRFSGVPDRFSGSGSGTDFTLKISRVEAEDVGVYYCFQVSHVPYTFGGGTKVEIKR

SEQ ID NO: 310 - protein, 246 aa, Artificial Sequence
  Description of Artificial Sequence: Synthetic polypeptide
EVQLVESGGGLVQPGGSLRLSCAASGFTFSNYGVEWVRQAPGKGLEWVSGIWADGSTHYADTVKSRFTISRDNSKNTLYLQMNSLRAEDTAVYYCAREWQHGPVAYWGQGTLVTVSSASTKGPSVFPLAPEVQLVQSGAEVKKPGASVKVSCKASGYTFTKYWLGWVRQAPGQGLEWMGDIYPGYDYTHYNEKFKDRVTLTTDTSTSTAYMELRSLRSDDTAVYYCARSDGSSTYWGQGTLVTVSS

SEQ ID NO: 311 - protein, 226 aa, Artificial Sequence; identical to SEQ ID NO: 307
  Description of Artificial Sequence: Synthetic polypeptide

SEQ ID NO: 312 - protein, 243 aa, Artificial Sequence
  Description of Artificial Sequence: Synthetic polypeptide
EVQLVQSGAEVKKPGASVKVSCKASGYTFTKYWLGWVRQAPGQGLEWMGDIYPGYDYTHYNEKFKDRVTLTTDTSTSTAYMELRSLRSDDTAVYYCARSDGSSTYWGQGTLVTVSSGGGGSGGGGSEVQLVESGGGLVQPGGSLRLSCAASGFTFSNYGVEWVRQAPGKGLEWVSGIWADGSTHYADTVKSRFTISRDNSKNTLYLQMNSLRAEDTAVYYCAREWQHGPVAYWGQGTLVTVSS

SEQ ID NO: 313 - protein, 230 aa, Artificial Sequence
  Description of Artificial Sequence: Synthetic polypeptide
DVLMTQTPLSLPVTPGEPASISCTSSQNIVHSNGNTYLEWYLQKPGQSPQLLIYKVSNRFSGVPDRFSGSGSGTDFTLKISRVEAEDVGVYYCFQVSHVPYTFGGGTKVEIKRGGSGGGGSGDIQMTQSPSSLSASVGDRVTITCKASQLVSSAVAWYQQKPGKAPKLLIYWASTLHTGVPSRFSGSGSGTDFTLTISSLQPEDFATYYCQQHYRTPFTFGQGTKLEIKR

SEQ ID NO: 314 - protein, 239 aa, Artificial Sequence
  Description of Artificial Sequence: Synthetic polypeptide
EVQLVQSGAEVKKPGASVKVSCKASGYTFTKYWLGWVRQAPGQGLEWMGDIYPGYDYTHYNEKFKDRVTLTTDTSTSTAYMELRSLRSDDTAVYYCARSDGSSTYWGQGTLVTVSSASTKGPEVQLVESGGGLVQPGGSLRLSCAASGFTFSNYGVEWVRQAPGKGLEWVSGIWADGSTHYADTVKSRFTISRDNSKNTLYLQMNSLRAEDTAVYYCAREWQHGPVAYWGQGTLVTVSS

SEQ ID NO: 315 - protein, 226 aa, Artificial Sequence
  Description of Artificial Sequence: Synthetic polypeptide
DVLMTQTPLSLPVTPGEPASISCTSSQNIVHSNGNTYLEWYLQKPGQSPQLLIYKVSNRFSGVPDRFSGSGSGTDFTLKISRVEAEDVGVYYCFQVSHVPYTFGGGTKVEIKRTVAAPDIQMTQSPSSLSASVGDRVTITCKASQLVSSAVAWYQQKPGKAPKLLIYWASTLHTGVPSRFSGSGSGTDFTLTISSLQPEDFATYYCQQHYRTPFTFGQGTKLEIKR

SEQ ID NO: 316 - protein, 239 aa, Artificial Sequence; identical to SEQ ID NO: 314
  Description of Artificial Sequence: Synthetic polypeptide

SEQ ID NO: 317 - protein, 233 aa, Artificial Sequence
  Description of Artificial Sequence: Synthetic polypeptide
DVLMTQTPLSLPVTPGEPASISCTSSQNIVHSNGNTYLEWYLQKPGQSPQLLIYKVSNRFSGVPDRFSGSGSGTDFTLKISRVEAEDVGVYYCFQVSHVPYTFGGGTKVEIKRTVAAPSVFIFPPDIQMTQSPSSLSASVGDRVTITCKASQLVSSAVAWYQQKPGKAPKLLIYWASTLHTGVPSRFSGSGSGTDFTLTISSLQPEDFATYYCQQHYRTPFTFGQGTKLEIKR

SEQ ID NO: 318 - protein, 246 aa, Artificial Sequence
  Description of Artificial Sequence: Synthetic polypeptide
EVQLVQSGAEVKKPGASVKVSCKASGYTFTKYWLGWVRQAPGQGLEWMGDIYPGYDYTHYNEKFKDRVTLTTDTSTSTAYMELRSLRSDDTAVYYCARSDGSSTYWGQGTLVTVSSASTKGPSVFPLAPEVQLVESGGGLVQPGGSLRLSCAASGFTFSNYGVEWVRQAPGKGLEWVSGIWADGSTHYADTVKSRFTISRDNSKNTLYLQMNSLRAEDTAVYYCAREWQHGPVAYWGQGTLVTVSS

SEQ ID NO: 319 - protein, 226 aa, Artificial Sequence; identical to SEQ ID NO: 315
  Description of Artificial Sequence: Synthetic polypeptide

SEQ ID NO: 320 - protein, 250 aa, Artificial Sequence
  Description of Artificial Sequence: Synthetic polypeptide
EVQLVQSGAEVKKPGASVKVSCKASGYTFANYGIIWVRQAPGQGLEWMGWINTYTGKPTYAQKFQGRVTMTTDTSTSTAYMELSSLRSEDTAVYYCARKLFTTMDVTDNAMDYWGQGTTVTVSSGGGGSGGGGSEVQLVQSGAEVKKPGASVKVSCKASGYTFTKYWLGWVRQAPGQGLEWMGDIYPGYDYTHYNEKFKDRVTLTTDTSTSTAYMELRSLRSDDTAVYYCARSDGSSTYWGQGTLVTVSS

SEQ ID NO: 321 - protein, 230 aa, Artificial Sequence
  Description of Artificial Sequence: Synthetic polypeptide
DIQMTQSPSSLSASVGDRVTITCRASQDISQYLNWYQQKPGKAPKLLIYYTSRLQSGVPSRFSGSGSGTDFTLTISSLQPEDFATYFCQQGNTWPPTFGQGTKLEIKRGGSGGGGSGDVLMTQTPLSLPVTPGEPASISCTSSQNIVHSNGNTYLEWYLQKPGQSPQLLIYKVSNRFSGVPDRFSGSGSGTDFTLKISRVEAEDVGVYYCFQVSHVPYTFGGGTKVEIKR

SEQ ID NO: 322 - protein, 246 aa, Artificial Sequence
  Description of Artificial Sequence: Synthetic polypeptide
EVQLVQSGAEVKKPGASVKVSCKASGYTFANYGIIWVRQAPGQGLEWMGWINTYTGKPTYAQKFQGRVTMTTDTSTSTAYMELSSLRSEDTAVYYCARKLFTTMDVTDNAMDYWGQGTTVTVSSASTKGPEVQLVQSGAEVKKPGASVKVSCKASGYTFTKYWLGWVRQAPGQGLEWMGDIYPGYDYTHYNEKFKDRVTLTTDTSTSTAYMELRSLRSDDTAVYYCARSDGSSTYWGQGTLVTVSS

SEQ ID NO: 323 - protein, 226 aa, Artificial Sequence
  Description of Artificial Sequence: Synthetic polypeptide
DIQMTQSPSSLSASVGDRVTITCRASQDISQYLNWYQQKPGKAPKLLIYYTSRLQSGVPSRFSGSGSGTDFTLTISSLQPEDFATYFCQQGNTWPPTFGQGTKLEIKRTVAAPDVLMTQTPLSLPVTPGEPASISCTSSQNIVHSNGNTYLEWYLQKPGQSPQLLIYKVSNRFSGVPDRFSGSGSGTDFTLKISRVEAEDVGVYYCFQVSHVPYTFGGGTKVEIKR

SEQ ID NO: 324 - protein, 246 aa, Artificial Sequence; identical to SEQ ID NO: 322
  Description of Artificial Sequence: Synthetic polypeptide

SEQ ID NO: 325 - protein, 233 aa, Artificial Sequence
  Description of Artificial Sequence: Synthetic polypeptide
DIQMTQSPSSLSASVGDRVTITCRASQDISQYLNWYQQKPGKAPKLLIYYTSRLQSGVPSRFSGSGSGTDFTLTISSLQPEDFATYFCQQGNTWPPTFGQGTKLEIKRTVAAPSVFIFPPDVLMTQTPLSLPVTPGEPASISCTSSQNIVHSNGNTYLEWYLQKPGQSPQLLIYKVSNRFSGVPDRFSGSGSGTDFTLKISRVEAEDVGVYYCFQVSHVPYTFGGGTKVEIKR

SEQ ID NO: 326 - protein, 253 aa, Artificial Sequence
  Description of Artificial Sequence: Synthetic polypeptide
EVQLVQSGAEVKKPGASVKVSCKASGYTFANYGIIWVRQAPGQGLEWMGWINTYTGKPTYAQKFQGRVTMTTDTSTSTAYMELSSLRSEDTAVYYCARKLFTTMDVTDNAMDYWGQGTTVTVSSASTKGPSVFPLAPEVQLVQSGAEVKKPGASVKVSCKASGYTFTKYWLGWVRQAPGQGLEWMGDIYPGYDYTHYNEKFKDRVTLTTDTSTSTAYMELRSLRSDDTAVYYCARSDGSSTYWGQGTLVTVSS

SEQ ID NO: 327 - protein, 226 aa, Artificial Sequence; identical to SEQ ID NO: 323
  Description of Artificial Sequence: Synthetic polypeptide

SEQ ID NO: 328 - protein, 250 aa, Artificial Sequence
  Description of Artificial Sequence: Synthetic polypeptide
EVQLVQSGAEVKKPGASVKVSCKASGYTFTKYWLGWVRQAPGQGLEWMGDIYPGYDYTHYNEKFKDRVTLTTDTSTSTAYMELRSLRSDDTAVYYCARSDGSSTYWGQGTLVTVSSGGGGSGGGGSEVQLVQSGAEVKKPGASVKVSCKASGYTFANYGIIWVRQAPGQGLEWMGWINTYTGKPTYAQKFQGRVTMTTDTSTSTAYMELSSLRSEDTAVYYCARKLFTTMDVTDNAMDYWGQGTTVTVSS

SEQ ID NO: 329 - protein, 230 aa, Artificial Sequence
  Description of Artificial Sequence: Synthetic polypeptide
DVLMTQTPLSLPVTPGEPASISCTSSQNIVHSNGNTYLEWYLQKPGQSPQLLIYKVSNRFSGVPDRFSGSGSGTDFTLKISRVEAEDVGVYYCFQVSHVPYTFGGGTKVEIKRGGSGGGGSGDIQMTQSPSSLSASVGDRVTITCRASQDISQYLNWYQQKPGKAPKLLIYYTSRLQSGVPSRFSGSGSGTDFTLTISSLQPEDFATYFCQQGNTWPPTFGQGTKLEIKR

SEQ ID NO: 330 - protein, 246 aa, Artificial Sequence
  Description of Artificial Sequence: Synthetic polypeptide
EVQLVQSGAEVKKPGASVKVSCKASGYTFTKYWLGWVRQAPGQGLEWMGDIYPGYDYTHYNEKFKDRVTLTTDTSTSTAYMELRSLRSDDTAVYYCARSDGSSTYWGQGTLVTVSSASTKGPEVQLVQSGAEVKKPGASVKVSCKASGYTFANYGIIWVRQAPGQGLEWMGWINTYTGKPTYAQKFQGRVTMTTDTSTSTAYMELSSLRSEDTAVYYCARKLFTTMDVTDNAMDYWGQGTTVTVSS

SEQ ID NO: 331 - protein, 226 aa, Artificial Sequence
  Description of Artificial Sequence: Synthetic polypeptide
DVLMTQTPLSLPVTPGEPASISCTSSQNIVHSNGNTYLEWYLQKPGQSPQLLIYKVSNRFSGVPDRFSGSGSGTDFTLKISRVEAEDVGVYYCFQVSHVPYTFGGGTKVEIKRTVAAPDIQMTQSPSSLSASVGDRVTITCRASQDISQYLNWYQQKPGKAPKLLIYYTSRLQSGVPSRFSGSGSGTDFTLTISSLQPEDFATYFCQQGNTWPPTFGQGTKLEIKR

SEQ ID NO: 332 - protein, 246 aa, Artificial Sequence; identical to SEQ ID NO: 330
  Description of Artificial Sequence: Synthetic polypeptide

SEQ ID NO: 333 - protein, 233 aa, Artificial Sequence
  Description of Artificial Sequence: Synthetic polypeptide
DVLMTQTPLSLPVTPGEPASISCTSSQNIVHSNGNTYLEWYLQKPGQSPQLLIYKVSNRFSGVPDRFSGSGSGTDFTLKISRVEAEDVGVYYCFQVSHVPYTFGGGTKVEIKRTVAAPSVFIFPPDIQMTQSPSSLSASVGDRVTITCRASQDISQYLNWYQQKPGKAPKLLIYYTSRLQSGVPSRFSGSGSGTDFTLTISSLQPEDFATYFCQQGNTWPPTFGQGTKLEIKR

SEQ ID NO: 334 - protein, 253 aa, Artificial Sequence
  Description of Artificial Sequence: Synthetic polypeptide
EVQLVQSGAEVKKPGASVKVSCKASGYTFTKYWLGWVRQAPGQGLEWMGDIYPGYDYTHYNEKFKDRVTLTTDTSTSTAYMELRSLRSDDTAVYYCARSDGSSTYWGQGTLVTVSSASTKGPSVFPLAPEVQLVQSGAEVKKPGASVKVSCKASGYTFANYGIIWVRQAPGQGLEWMGWINTYTGKPTYAQKFQGRVTMTTDTSTSTAYMELSSLRSEDTAVYYCARKLFTTMDVTDNAMDYWGQGTTVTVSS

SEQ ID NO: 335 - protein, 226 aa, Artificial Sequence; identical to SEQ ID NO: 331
  Description of Artificial Sequence: Synthetic polypeptide

SEQ ID NO: 336 - protein, 250 aa, Artificial Sequence
  Description of Artificial Sequence: Synthetic polypeptide
EVQLVQSGAEVKKPGASVKVSCKASGYTFNNYGIIWVRQAPGQGLEWMGWINTYTGKPTYAQKFQGRVTMTTDTSTSTAYMELSSLRSEDTAVYYCARKLFNTVAVTDNAMDYWGQGTTVTVSSGGGGSGGGGSEVQLVQSGAEVKKPGASVKVSCKASGYTFTKYWLGWVRQAPGQGLEWMGDIYPGYDYTHYNEKFKDRVTLTTDTSTSTAYMELRSLRSDDTAVYYCARSDGSSTYWGQGTLVTVSS

SEQ ID NO: 337 - protein, 230 aa, Artificial Sequence
  Description of Artificial Sequence: Synthetic polypeptide
DIQMTQSPSSLSASVGDRVTITCRASQDIENYLNWYQQKPGKAPKLLIYYTSRLQSGVPSRFSGSGSGTDFTLTISSLQPEDFATYFCQQGNTQPPTFGQGTKLEIKRGGSGGGGSGDVLMTQTPLSLPVTPGEPASISCTSSQNIVHSNGNTYLEWYLQKPGQSPQLLIYKVSNRFSGVPDRFSGSGSGTDFTLKISRVEAEDVGVYYCFQVSHVPYTFGGGTKVEIKR

SEQ ID NO: 338 - protein, 246 aa, Artificial Sequence
  Description of Artificial Sequence: Synthetic polypeptide
EVQLVQSGAEVKKPGASVKVSCKASGYTFNNYGIIWVRQAPGQGLEWMGWINTYTGKPTYAQKFQGRVTMTTDTSTSTAYMELSSLRSEDTAVYYCARKLFNTVAVTDNAMDYWGQGTTVTVSSASTKGPEVQLVQSGAEVKKPGASVKVSCKASGYTFTKYWLGWVRQAPGQGLEWMGDIYPGYDYTHYNEKFKDRVTLTTDTSTSTAYMELRSLRSDDTAVYYCARSDGSSTYWGQGTLVTVSS

SEQ ID NO: 339 - protein, 226 aa, Artificial Sequence
  Description of Artificial Sequence: Synthetic polypeptide
DIQMTQSPSSLSASVGDRVTITCRASQDIENYLNWYQQKPGKAPKLLIYYTSRLQSGVPSRFSGSGSGTDFTLTISSLQPEDFATYFCQQGNTQPPTFGQGTKLEIKRTVAAPDVLMTQTPLSLPVTPGEPASISCTSSQNIVHSNGNTYLEWYLQKPGQSPQLLIYKVSNRFSGVPDRFSGSGSGTDFTLKISRVEAEDVGVYYCFQVSHVPYTFGGGTKVEIKR

SEQ ID NO: 340 - protein, 246 aa, Artificial Sequence; identical to SEQ ID NO: 338
  Description of Artificial Sequence: Synthetic polypeptide

SEQ ID NO: 341 - protein, 233 aa, Artificial Sequence
  Description of Artificial Sequence: Synthetic polypeptide
DIQMTQSPSSLSASVGDRVTITCRASQDIENYLNWYQQKPGKAPKLLIYYTSRLQSGVPSRFSGSGSGTDFTLTISSLQPEDFATYFCQQGNTQPPTFGQGTKLEIKRTVAAPSVFIFPPDVLMTQTPLSLPVTPGEPASISCTSSQNIVHSNGNTYLEWYLQKPGQSPQLLIYKVSNRFSGVPDRFSGSGSGTDFTLKISRVEAEDVGVYYCFQVSHVPYTFGGGTKVEIKR

SEQ ID NO: 342 - protein, 253 aa, Artificial Sequence
  Description of Artificial Sequence: Synthetic polypeptide
EVQLVQSGAEVKKPGASVKVSCKASGYTFNNYGIIWVRQAPGQGLEWMGWINTYTGKPTYAQKFQGRVTMTTDTSTSTAYMELSSLRSEDTAVYYCARKLFNTVAVTDNAMDYWGQGTTVTVSSASTKGPSVFPLAPEVQLVQSGAEVKKPGASVKVSCKASGYTFTKYWLGWVRQAPGQGLEWMGDIYPGYDYTHYNEKFKDRVTLTTDTSTSTAYMELRSLRSDDTAVYYCARSDGSSTYWGQGTLVTVSS

SEQ ID NO: 343 - protein, 226 aa, Artificial Sequence; identical to SEQ ID NO: 339
  Description of Artificial Sequence: Synthetic polypeptide

SEQ ID NO: 344 - protein, 250 aa, Artificial Sequence
  Description of Artificial Sequence: Synthetic polypeptide
EVQLVQSGAEVKKPGASVKVSCKASGYTFTKYWLGWVRQAPGQGLEWMGDIYPGYDYTHYNEKFKDRVTLTTDTSTSTAYMELRSLRSDDTAVYYCARSDGSSTYWGQGTLVTVSSGGGGSGGGGSEVQLVQSGAEVKKPGASVKVSCKASGYTFNNYGIIWVRQAPGQGLEWMGWINTYTGKPTYAQKFQGRVTMTTDTSTSTAYMELSSLRSEDTAVYYCARKLFNTVAVTDNAMDYWGQGTTVTVSS

SEQ ID NO: 345 - protein, 230 aa, Artificial Sequence
  Description of Artificial Sequence: Synthetic polypeptide
DVLMTQTPLSLPVTPGEPASISCTSSQNIVHSNGNTYLEWYLQKPGQSPQLLIYKVSNRFSGVPDRFSGSGSGTDFTLKISRVEAEDVGVYYCFQVSHVPYTFGGGTKVEIKRGGSGGGGSGDIQMTQSPSSLSASVGDRVTITCRASQDIENYLNWYQQKPGKAPKLLIYYTSRLQSGVPSRFSGSGSGTDFTLTISSLQPEDFATYFCQQGNTQPPTFGQGTKLEIKR

SEQ ID NO: 346 - protein, 246 aa, Artificial Sequence
  Description of Artificial Sequence: Synthetic polypeptide
EVQLVQSGAEVKKPGASVKVSCKASGYTFTKYWLGWVRQAPGQGLEWMGDIYPGYDYTHYNEKFKDRVTLTTDTSTSTAYMELRSLRSDDTAVYYCARSDGSSTYWGQGTLVTVSSASTKGPEVQLVQSGAEVKKPGASVKVSCKASGYTFNNYGIIWVRQAPGQGLEWMGWINTYTGKPTYAQKFQGRVTMTTDTSTSTAYMELSSLRSEDTAVYYCARKLFNTVAVTDNAMDYWGQGTTVTVSS

SEQ ID NO: 347 - protein, 226 aa, Artificial Sequence
  Description of Artificial Sequence: Synthetic polypeptide
DVLMTQTPLSLPVTPGEPASISCTSSQNIVHSNGNTYLEWYLQKPGQSPQLLIYKVSNRFSGVPDRFSGSGSGTDFTLKISRVEAEDVGVYYCFQVSHVPYTFGGGTKVEIKRTVAAPDIQMTQSPSSLSASVGDRVTITCRASQDIENYLNWYQQKPGKAPKLLIYYTSRLQSGVPSRFSGSGSGTDFTLTISSLQPEDFATYFCQQGNTQPPTFGQGTKLEIKR

SEQ ID NO: 348 - protein, 246 aa, Artificial Sequence; identical to SEQ ID NO: 346
  Description of Artificial Sequence: Synthetic polypeptide

SEQ ID NO: 349 - protein, 233 aa, Artificial Sequence
  Description of Artificial Sequence: Synthetic polypeptide
DVLMTQTPLSLPVTPGEPASISCTSSQNIVHSNGNTYLEWYLQKPGQSPQLLIYKVSNRFSGVPDRFSGSGSGTDFTLKISRVEAEDVGVYYCFQVSHVPYTFGGGTKVEIKRTVAAPSVFIFPPDIQMTQSPSSLSASVGDRVTITCRASQDIENYLNWYQQKPGKAPKLLIYYTSRLQSGVPSRFSGSGSGTDFTLTISSLQPEDFATYFCQQGNTQPPTFGQGTKLEIKR

SEQ ID NO: 350 - protein, 253 aa, Artificial Sequence
  Description of Artificial Sequence: Synthetic polypeptide
EVQLVQSGAEVKKPGASVKVSCKASGYTFTKYWLGWVRQAPGQGLEWMGDIYPGYDYTHYNEKFKDRVTLTTDTSTSTAYMELRSLRSDDTAVYYCARSDGSSTYWGQGTLVTVSSASTKGPSVFPLAPEVQLVQSGAEVKKPGASVKVSCKASGYTFNNYGIIWVRQAPGQGLEWMGWINTYTGKPTYAQKFQGRVTMTTDTSTSTAYMELSSLRSEDTAVYYCARKLFNTVAVTDNAMDYWGQGTTVTVSS

SEQ ID NO: 351 - protein, 226 aa, Artificial Sequence; identical to SEQ ID NO: 347
  Description of Artificial Sequence: Synthetic polypeptide

SEQ ID NO: 352 - protein, 243 aa, Artificial Sequence
  Description of Artificial Sequence: Synthetic polypeptide
EVQLVESGGGLVQPGGSLRLSCAASGFTFSNYGVTWVRQAPGKGLEWVSMIWADGSTHYASSVKGRFTISRDNSKNTLYLQMNSLRAEDTAVYYCAREWQHGPVAYWGQGTLVTVSSGGGGSGGGGSEVQLVESGGGLVQPGGSLRLSCAASGFSFSKYWLGWVRQAPGKGLEWVSDIYPGYDYTHYNEKFKDRFTISADTSKNTAYLQMNSLRAEDTAVYYCARSDGSSTYWGQGTLVTVSS

SEQ ID NO: 353 - protein, 230 aa, Artificial Sequence
  Description of Artificial Sequence: Synthetic polypeptide
DIQMTQSPSSLSASVGDRVTITCRASQLVSSAVAWYQQKPGKAPKLLIYWASARHTGVPSRFSGSGSGTDFTLTISSLQPEDFATYYCQQHYKTPFTFGQGTKLEIKRGGSGGGGSGDIQMTQSPSSLSASVGDRVTITCTSSQNIVHSNGNTYLEWYQQKPGKAPKLLIYKVSNRFSGVPSRFSGSGSGTDFTLTISSLQPEDFATYYCFQVSHVPYTFGQGTKVEIKR

SEQ ID NO: 354 - protein, 239 aa, Artificial Sequence
  Description of Artificial Sequence: Synthetic polypeptide
EVQLVESGGGLVQPGGSLRLSCAASGFTFSNYGVTWVRQAPGKGLEWVSMIWADGSTHYASSVKGRFTISRDNSKNTLYLQMNSLRAEDTAVYYCAREWQHGPVAYWGQGTLVTVSSASTKGPEVQLVESGGGLVQPGGSLRLSCAASGFSFSKYWLGWVRQAPGKGLEWVSDIYPGYDYTHYNEKFKDRFTISADTSKNTAYLQMNSLRAEDTAVYYCARSDGSSTYWGQGTLVTVSS

SEQ ID NO: 355 - protein, 226 aa, Artificial Sequence
  Description of Artificial Sequence: Synthetic polypeptide
DIQMTQSPSSLSASVGDRVTITCRASQLVSSAVAWYQQKPGKAPKLLIYWASARHTGVPSRFSGSGSGTDFTLTISSLQPEDFATYYCQQHYKTPFTFGQGTKLEIKRTVAAPDIQMTQSPSSLSASVGDRVTITCTSSQNIVHSNGNTYLEWYQQKPGKAPKLLIYKVSNRFSGVPSRFSGSGSGTDFTLTISSLQPEDFATYYCFQVSHVPYTFGQGTKVEIKR

SEQ ID NO: 356 - protein, 239 aa, Artificial Sequence; identical to SEQ ID NO: 354
  Description of Artificial Sequence: Synthetic polypeptide

SEQ ID NO: 357 - protein, 233 aa, Artificial Sequence
  Description of Artificial Sequence: Synthetic polypeptide
DIQMTQSPSSLSASVGDRVTITCRASQLVSSAVAWYQQKPGKAPKLLIYWASARHTGVPSRFSGSGSGTDFTLTISSLQPEDFATYYCQQHYKTPFTFGQGTKLEIKRTVAAPSVFIFPPDIQMTQSPSSLSASVGDRVTITCTSSQNIVHSNGNTYLEWYQQKPGKAPKLLIYKVSNRFSGVPSRFSGSGSGTDFTLTISSLQPEDFATYYCFQVSHVPYTFGQGTKVEIKR

SEQ ID NO: 358 - protein, 246 aa, Artificial Sequence
  Description of Artificial Sequence: Synthetic polypeptide
EVQLVESGGGLVQPGGSLRLSCAASGFTFSNYGVTWVRQAPGKGLEWVSMIWADGSTHYASSVKGRFTISRDNSKNTLYLQMNSLRAEDTAVYYCAREWQHGPVAYWGQGTLVTVSSASTKGPSVFPLAPEVQLVESGGGLVQPGGSLRLSCAASGFSFSKYWLGWVRQAPGKGLEWVSDIYPGYDYTHYNEKFKDRFTISADTSKNTAYLQMNSLRAEDTAVYYCARSDGSSTYWGQGTLVTVSS

SEQ ID NO: 359 - protein, 226 aa, Artificial Sequence; identical to SEQ ID NO: 355
  Description of Artificial Sequence: Synthetic polypeptide

SEQ ID NO: 360 - protein, 243 aa, Artificial Sequence
  Description of Artificial Sequence: Synthetic polypeptide
EVQLVESGGGLVQPGGSLRLSCAASGFSFSKYWLGWVRQAPGKGLEWVSDIYPGYDYTHYNEKFKDRFTISADTSKNTAYLQMNSLRAEDTAVYYCARSDGSSTYWGQGTLVTVSSGGGGSGGGGSEVQLVESGGGLVQPGGSLRLSCAASGFTFSNYGVTWVRQAPGKGLEWVSMIWADGSTHYASSVKGRFTISRDNSKNTLYLQMNSLRAEDTAVYYCAREWQHGPVAYWGQGTLVTVSS

SEQ ID NO: 361 - protein, 230 aa, Artificial Sequence
  Description of Artificial Sequence: Synthetic polypeptide
DIQMTQSPSSLSASVGDRVTITCTSSQNIVHSNGNTYLEWYQQKPGKAPKLLIYKVSNRFSGVPSRFSGSGSGTDFTLTISSLQPEDFATYYCFQVSHVPYTFGQGTKVEIKRGGSGGGGSGDIQMTQSPSSLSASVGDRVTITCRASQLVSSAVAWYQQKPGKAPKLLIYWASARHTGVPSRFSGSGSGTDFTLTISSLQPEDFATYYCQQHYKTPFTFGQGTKLEIKR

SEQ ID NO: 362 - protein, 239 aa, Artificial Sequence
  Description of Artificial Sequence: Synthetic polypeptide
EVQLVESGGGLVQPGGSLRLSCAASGFSFSKYWLGWVRQAPGKGLEWVSDIYPGYDYTHYNEKFKDRFTISADTSKNTAYLQMNSLRAEDTAVYYCARSDGSSTYWGQGTLVTVSSASTKGPEVQLVESGGGLVQPGGSLRLSCAASGFTFSNYGVTWVRQAPGKGLEWVSMIWADGSTHYASSVKGRFTISRDNSKNTLYLQMNSLRAEDTAVYYCAREWQHGPVAYWGQGTLVTVSS

SEQ ID NO: 363 - protein, 226 aa, Artificial Sequence
  Description of Artificial Sequence: Synthetic polypeptide
DIQMTQSPSSLSASVGDRVTITCTSSQNIVHSNGNTYLEWYQQKPGKAPKLLIYKVSNRFSGVPSRFSGSGSGTDFTLTISSLQPEDFATYYCFQVSHVPYTFGQGTKVEIKRTVAAPDIQMTQSPSSLSASVGDRVTITCRASQLVSSAVAWYQQKPGKAPKLLIYWASARHTGVPSRFSGSGSGTDFTLTISSLQPEDFATYYCQQHYKTPFTFGQGTKLEIKR

SEQ ID NO: 364 - protein, 239 aa, Artificial Sequence; identical to SEQ ID NO: 362
  Description of Artificial Sequence: Synthetic polypeptide

SEQ ID NO: 365 - protein, 233 aa, Artificial Sequence
  Description of Artificial Sequence: Synthetic polypeptide
DIQMTQSPSSLSASVGDRVTITCTSSQNIVHSNGNTYLEWYQQKPGKAPKLLIYKVSNRFSGVPSRFSGSGSGTDFTLTISSLQPEDFATYYCFQVSHVPYTFGQGTKVEIKRTVAAPSVFIFPPDIQMTQSPSSLSASVGDRVTITCRASQLVSSAVAWYQQKPGKAPKLLIYWASARHTGVPSRFSGSGSGTDFTLTISSLQPEDFATYYCQQHYKTPFTFGQGTKLEIKR

SEQ ID NO: 366 - protein, 246 aa, Artificial Sequence
  Description of Artificial Sequence: Synthetic polypeptide
EVQLVESGGGLVQPGGSLRLSCAASGFSFSKYWLGWVRQAPGKGLEWVSDIYPGYDYTHYNEKFKDRFTISADTSKNTAYLQMNSLRAEDTAVYYCARSDGSSTYWGQGTLVTVSSASTKGPSVFPLAPEVQLVESGGGLVQPGGSLRLSCAASGFTFSNYGVTWVRQAPGKGLEWVSMIWADGSTHYASSVKGRFTISRDNSKNTLYLQMNSLRAEDTAVYYCAREWQHGPVAYWGQGTLVTVSS

SEQ ID NO: 367 - protein, 226 aa, Artificial Sequence; identical to SEQ ID NO: 363
  Description of Artificial Sequence: Synthetic polypeptide

SEQ ID NO: 368 - protein, 243 aa, Artificial Sequence
  Description of Artificial Sequence: Synthetic polypeptide
EVQLVESGGGLVQPGGSLRLSCAASGFTFSNYGVEWVRQAPGKGLEWVSGIWADGSTHYADTVKSRFTISRDNSKNTLYLQMNSLRAEDTAVYYCAREWQHGPVAYWGQGTLVTVSSGGGGSGGGGSEVQLVESGGGLVQPGGSLRLSCAASGFSFSKYWLGWVRQAPGKGLEWVSDIYPGYDYTHYNEKFKDRFTISADTSKNTAYLQMNSLRAEDTAVYYCARSDGSSTYWGQGTLVTVSS

SEQ ID NO: 369 - protein, 230 aa, Artificial Sequence
  Description of Artificial Sequence: Synthetic polypeptide
DIQMTQSPSSLSASVGDRVTITCKASQLVSSAVAWYQQKPGKAPKLLIYWASTLHTGVPSRFSGSGSGTDFTLTISSLQPEDFATYYCQQHYRTPFTFGQGTKLEIKRGGSGGGGSGDIQMTQSPSSLSASVGDRVTITCTSSQNIVHSNGNTYLEWYQQKPGKAPKLLIYKVSNRFSGVPSRFSGSGSGTDFTLTISSLQPEDFATYYCFQVSHVPYTFGQGTKVEIKR

SEQ ID NO: 370 - protein, 239 aa, Artificial Sequence
  Description of Artificial Sequence: Synthetic polypeptide
EVQLVESGGGLVQPGGSLRLSCAASGFTFSNYGVEWVRQAPGKGLEWVSGIWADGSTHYADTVKSRFTISRDNSKNTLYLQMNSLRAEDTAVYYCAREWQHGPVAYWGQGTLVTVSSASTKGPEVQLVESGGGLVQPGGSLRLSCAASGFSFSKYWLGWVRQAPGKGLEWVSDIYPGYDYTHYNEKFKDRFTISADTSKNTAYLQMNSLRAEDTAVYYCARSDGSSTYWGQGTLVTVSS

SEQ ID NO: 371 - protein, 226 aa, Artificial Sequence
  Description of Artificial Sequence: Synthetic polypeptide
DIQMTQSPSSLSASVGDRVTITCKASQLVSSAVAWYQQKPGKAPKLLIYWASTLHTGVPSRFSGSGSGTDFTLTISSLQPEDFATYYCQQHYRTPFTFGQGTKLEIKRTVAAPDIQMTQSPSSLSASVGDRVTITCTSSQNIVHSNGNTYLEWYQQKPGKAPKLLIYKVSNRFSGVPSRFSGSGSGTDFTLTISSLQPEDFATYYCFQVSHVPYTFGQGTKVEIKR

SEQ ID NO: 372 - protein, 239 aa, Artificial Sequence; identical to SEQ ID NO: 370
  Description of Artificial Sequence: Synthetic polypeptide

SEQ ID NO: 373 - protein, 233 aa, Artificial Sequence
  Description of Artificial Sequence: Synthetic polypeptide
DIQMTQSPSSLSASVGDRVTITCKASQLVSSAVAWYQQKPGKAPKLLIYWASTLHTGVPSRFSGSGSGTDFTLTISSLQPEDFATYYCQQHYRTPFTFGQGTKLEIKRTVAAPSVFIFPPDIQMTQSPSSLSASVGDRVTITCTSSQNIVHSNGNTYLEWYQQKPGKAPKLLIYKVSNRFSGVPSRFSGSGSGTDFTLTISSLQPEDFATYYCFQVSHVPYTFGQGTKVEIKR

SEQ ID NO: 374 - protein, 246 aa, Artificial Sequence
  Description of Artificial Sequence: Synthetic polypeptide
EVQLVESGGGLVQPGGSLRLSCAASGFTFSNYGVEWVRQAPGKGLEWVSGIWADGSTHYADTVKSRFTISRDNSKNTLYLQMNSLRAEDTAVYYCAREWQHGPVAYWGQGTLVTVSSASTKGPSVFPLAPEVQLVESGGGLVQPGGSLRLSCAASGFSFSKYWLGWVRQAPGKGLEWVSDIYPGYDYTHYNEKFKDRFTISADTSKNTAYLQMNSLRAEDTAVYYCARSDGSSTYWGQGTLVTVSS

SEQ ID NO: 375 - protein, 226 aa, Artificial Sequence; identical to SEQ ID NO: 371
  Description of Artificial Sequence: Synthetic polypeptide

SEQ ID NO: 376 - protein, 243 aa, Artificial Sequence
  Description of Artificial Sequence: Synthetic polypeptide
EVQLVESGGGLVQPGGSLRLSCAASGFSFSKYWLGWVRQAPGKGLEWVSDIYPGYDYTHYNEKFKDRFTISADTSKNTAYLQMNSLRAEDTAVYYCARSDGSSTYWGQGTLVTVSSGGGGSGGGGSEVQLVESGGGLVQPGGSLRLSCAASGFTFSNYGVEWVRQAPGKGLEWVSGIWADGSTHYADTVKSRFTISRDNSKNTLYLQMNSLRAEDTAVYYCAREWQHGPVAYWGQGTLVTVSS

SEQ ID NO: 377 - protein, 230 aa, Artificial Sequence
  Description of Artificial Sequence: Synthetic polypeptide
DIQMTQSPSSLSASVGDRVTITCTSSQNIVHSNGNTYLEWYQQKPGKAPKLLIYKVSNRFSGVPSRFSGSGSGTDFTLTISSLQPEDFATYYCFQVSHVPYTFGQGTKVEIKRGGSGGGGSGDIQMTQSPSSLSASVGDRVTITCKASQLVSSAVAWYQQKPGKAPKLLIYWASTLHTGVPSRFSGSGSGTDFTLTISSLQPEDFATYYCQQHYRTPFTFGQGTKLEIKR

SEQ ID NO: 378 - protein, 239 aa, Artificial Sequence
  Description of Artificial Sequence: Synthetic polypeptide
EVQLVESGGGLVQPGGSLRLSCAASGFSFSKYWLGWVRQAPGKGLEWVSDIYPGYDYTHYNEKFKDRFTISADTSKNTAYLQMNSLRAEDTAVYYCARSDGSSTYWGQGTLVTVSSASTKGPEVQLVESGGGLVQPGGSLRLSCAASGFTFSNYGVEWVRQAPGKGLEWVSGIWADGSTHYADTVKSRFTISRDNSKNTLYLQMNSLRAEDTAVYYCAREWQHGPVAYWGQGTLVTVSS

SEQ ID NO: 379 - protein, 226 aa, Artificial Sequence
  Description of Artificial Sequence: Synthetic polypeptide
DIQMTQSPSSLSASVGDRVTITCTSSQNIVHSNGNTYLEWYQQKPGKAPKLLIYKVSNRFSGVPSRFSGSGSGTDFTLTISSLQPEDFATYYCFQVSHVPYTFGQGTKVEIKRTVAAPDIQMTQSPSSLSASVGDRVTITCKASQLVSSAVAWYQQKPGKAPKLLIYWASTLHTGVPSRFSGSGSGTDFTLTISSLQPEDFATYYCQQHYRTPFTFGQGTKLEIKR

SEQ ID NO: 380 - protein, 239 aa, Artificial Sequence; identical to SEQ ID NO: 378
  Description of Artificial Sequence: Synthetic polypeptide

SEQ ID NO: 381 - protein, 233 aa, Artificial Sequence
  Description of Artificial Sequence: Synthetic polypeptide
DIQMTQSPSSLSASVGDRVTITCTSSQNIVHSNGNTYLEWYQQKPGKAPKLLIYKVSNRFSGVPSRFSGSGSGTDFTLTISSLQPEDFATYYCFQVSHVPYTFGQGTKVEIKRTVAAPSVFIFPPDIQMTQSPSSLSASVGDRVTITCKASQLVSSAVAWYQQKPGKAPKLLIYWASTLHTGVPSRFSGSGSGTDFTLTISSLQPEDFATYYCQQHYRTPFTFGQGTKLEIKR

SEQ ID NO: 382 - protein, 246 aa, Artificial Sequence
  Description of Artificial Sequence: Synthetic polypeptide
EVQLVESGGGLVQPGGSLRLSCAASGFSFSKYWLGWVRQAPGKGLEWVSDIYPGYDYTHYNEKFKDRFTISADTSKNTAYLQMNSLRAEDTAVYYCARSDGSSTYWGQGTLVTVSSASTKGPSVFPLAPEVQLVESGGGLVQPGGSLRLSCAASGFTFSNYGVEWVRQAPGKGLEWVSGIWADGSTHYADTVKSRFTISRDNSKNTLYLQMNSLRAEDTAVYYCAREWQHGPVAYWGQGTLVTVSS

SEQ ID NO: 383 - protein, 226 aa, Artificial Sequence; identical to SEQ ID NO: 379
  Description of Artificial Sequence: Synthetic polypeptide

SEQ ID NO: 384 - protein, 250 aa, Artificial Sequence
  Description of Artificial Sequence: Synthetic polypeptide
EVQLVQSGAEVKKPGASVKVSCKASGYTFANYGIIWVRQAPGQGLEWMGWINTYTGKPTYAQKFQGRVTMTTDTSTSTAYMELSSLRSEDTAVYYCARKLFTTMDVTDNAMDYWGQGTTVTVSSGGGGSGGGGSEVQLVESGGGLVQPGGSLRLSCAASGFSFSKYWLGWVRQAPGKGLEWVSDIYPGYDYTHYNEKFKDRFTISADTSKNTAYLQMNSLRAEDTAVYYCARSDGSSTYWGQGTLVTVSS

SEQ ID NO: 385 - protein, 230 aa, Artificial Sequence
  Description of Artificial Sequence: Synthetic polypeptide
DIQMTQSPSSLSASVGDRVTITCRASQDISQYLNWYQQKPGKAPKLLIYYTSRLQSGVPSRFSGSGSGTDFTLTISSLQPEDFATYFCQQGNTWPPTFGQGTKLEIKRGGSGGGGSGDIQMTQSPSSLSASVGDRVTITCTSSQNIVHSNGNTYLEWYQQKPGKAPKLLIYKVSNRFSGVPSRFSGSGSGTDFTLTISSLQPEDFATYYCFQVSHVPYTFGQGTKVEIKR

SEQ ID NO: 386 - protein, 246 aa, Artificial Sequence
  Description of Artificial Sequence: Synthetic polypeptide
EVQLVQSGAEVKKPGASVKVSCKASGYTFANYGIIWVRQAPGQGLEWMGWINTYTGKPTYAQKFQGRVTMTTDTSTSTAYMELSSLRSEDTAVYYCARKLFTTMDVTDNAMDYWGQGTTVTVSSASTKGPEVQLVESGGGLVQPGGSLRLSCAASGFSFSKYWLGWVRQAPGKGLEWVSDIYPGYDYTHYNEKFKDRFTISADTSKNTAYLQMNSLRAEDTAVYYCARSDGSSTYWGQGTLVTVSS

SEQ ID NO: 387 - protein, 226 aa, Artificial Sequence
  Description of Artificial Sequence: Synthetic polypeptide
DIQMTQSPSSLSASVGDRVTITCRASQDISQYLNWYQQKPGKAPKLLIYYTSRLQSGVPSRFSGSGSGTDFTLTISSLQPEDFATYFCQQGNTWPPTFGQGTKLEIKRTVAAPDIQMTQSPSSLSASVGDRVTITCTSSQNIVHSNGNTYLEWYQQKPGKAPKLLIYKVSNRFSGVPSRFSGSGSGTDFTLTISSLQPEDFATYYCFQVSHVPYTFGQGTKVEIKR

SEQ ID NO: 388 - protein, 246 aa, Artificial Sequence; identical to SEQ ID NO: 386
  Description of Artificial Sequence: Synthetic polypeptide

SEQ ID NO: 389 - protein, 233 aa, Artificial Sequence
  Description of Artificial Sequence: Synthetic polypeptide
DIQMTQSPSSLSASVGDRVTITCRASQDISQYLNWYQQKPGKAPKLLIYYTSRLQSGVPSRFSGSGSGTDFTLTISSLQPEDFATYFCQQGNTWPPTFGQGTKLEIKRTVAAPSVFIFPPDIQMTQSPSSLSASVGDRVTITCTSSQNIVHSNGNTYLEWYQQKPGKAPKLLIYKVSNRFSGVPSRFSGSGSGTDFTLTISSLQPEDFATYYCFQVSHVPYTFGQGTKVEIKR

SEQ ID NO: 390 - protein, 253 aa, Artificial Sequence
  Description of Artificial Sequence: Synthetic polypeptide
EVQLVQSGAEVKKPGASVKVSCKASGYTFANYGIIWVRQAPGQGLEWMGWINTYTGKPTYAQKFQGRVTMTTDTSTSTAYMELSSLRSEDTAVYYCARKLFTTMDVTDNAMDYWGQGTTVTVSSASTKGPSVFPLAPEVQLVESGGGLVQPGGSLRLSCAASGFSFSKYWLGWVRQAPGKGLEWVSDIYPGYDYTHYNEKFKDRFTISADTSKNTAYLQMNSLRAEDTAVYYCARSDGSSTYWGQGTLVTVSS

SEQ ID NO: 391 - protein, 226 aa, Artificial Sequence; identical to SEQ ID NO: 387
  Description of Artificial Sequence: Synthetic polypeptide

SEQ ID NO: 392 - protein, 250 aa, Artificial Sequence
  Description of Artificial Sequence: Synthetic polypeptide
EVQLVESGGGLVQPGGSLRLSCAASGFSFSKYWLGWVRQAPGKGLEWVSDIYPGYDYTHYNEKFKDRFTISADTSKNTAYLQMNSLRAEDTAVYYCARSDGSSTYWGQGTLVTVSSGGGGSGGGGSEVQLVQSGAEVKKPGASVKVSCKASGYTFANYGIIWVRQAPGQGLEWMGWINTYTGKPTYAQKFQGRVTMTTDTSTSTAYMELSSLRSEDTAVYYCARKLFTTMDVTDNAMDYWGQGTTVTVSS

SEQ ID NO: 393 - protein, 230 aa, Artificial Sequence
  Description of Artificial Sequence: Synthetic polypeptide
DIQMTQSPSSLSASVGDRVTITCTSSQNIVHSNGNTYLEWYQQKPGKAPKLLIYKVSNRFSGVPSRFSGSGSGTDFTLTISSLQPEDFATYYCFQVSHVPYTFGQGTKVEIKRGGSGGGGSGDIQMTQSPSSLSASVGDRVTITCRASQDISQYLNWYQQKPGKAPKLLIYYTSRLQSGVPSRFSGSGSGTDFTLTISSLQPEDFATYFCQQGNTWPPTFGQGTKLEIKR

SEQ ID NO: 394 - protein, 246 aa, Artificial Sequence
  Description of Artificial Sequence: Synthetic polypeptide
EVQLVESGGGLVQPGGSLRLSCAASGFSFSKYWLGWVRQAPGKGLEWVSDIYPGYDYTHYNEKFKDRFTISADTSKNTAYLQMNSLRAEDTAVYYCARSDGSSTYWGQGTLVTVSSASTKGPEVQLVQSGAEVKKPGASVKVSCKASGYTFANYGIIWVRQAPGQGLEWMGWINTYTGKPTYAQKFQGRVTMTTDTSTSTAYMELSSLRSEDTAVYYCARKLFTTMDVTDNAMDYWGQGTTVTVSS

SEQ ID NO: 395 - protein, 226 aa, Artificial Sequence
  Description of Artificial Sequence: Synthetic polypeptide
DIQMTQSPSSLSASVGDRVTITCTSSQNIVHSNGNTYLEWYQQKPGKAPKLLIYKVSNRFSGVPSRFSGSGSGTDFTLTISSLQPEDFATYYCFQVSHVPYTFGQGTKVEIKRTVAAPDIQMTQSPSSLSASVGDRVTITCRASQDISQYLNWYQQKPGKAPKLLIYYTSRLQSGVPSRFSGSGSGTDFTLTISSLQPEDFATYFCQQGNTWPPTFGQGTKLEIKR

SEQ ID NO: 396 - protein, 246 aa, Artificial Sequence; identical to SEQ ID NO: 394
  Description of Artificial Sequence: Synthetic polypeptide

SEQ ID NO: 397 - protein, 233 aa, Artificial Sequence
  Description of Artificial Sequence: Synthetic polypeptide
DIQMTQSPSSLSASVGDRVTITCTSSQNIVHSNGNTYLEWYQQKPGKAPKLLIYKVSNRFSGVPSRFSGSGSGTDFTLTISSLQPEDFATYYCFQVSHVPYTFGQGTKVEIKRTVAAPSVFIFPPDIQMTQSPSSLSASVGDRVTITCRASQDISQYLNWYQQKPGKAPKLLIYYTSRLQSGVPSRFSGSGSGTDFTLTISSLQPEDFATYFCQQGNTWPPTFGQGTKLEIKR

SEQ ID NO: 398 - protein, 253 aa, Artificial Sequence
  Description of Artificial Sequence: Synthetic polypeptide
EVQLVESGGGLVQPGGSLRLSCAASGFSFSKYWLGWVRQAPGKGLEWVSDIYPGYDYTHYNEKFKDRFTISADTSKNTAYLQMNSLRAEDTAVYYCARSDGSSTYWGQGTLVTVSSASTKGPSVFPLAPEVQLVQSGAEVKKPGASVKVSCKASGYTFANYGIIWVRQAPGQGLEWMGWINTYTGKPTYAQKFQGRVTMTTDTSTSTAYMELSSLRSEDTAVYYCARKLFTTMDVTDNAMDYWGQGTTVTVSS

SEQ ID NO: 399 - protein, 226 aa, Artificial Sequence; identical to SEQ ID NO: 395
  Description of Artificial Sequence: Synthetic polypeptide

SEQ ID NO: 400 - protein, 250 aa, Artificial Sequence
  Description of Artificial Sequence: Synthetic polypeptide
EVQLVQSGAEVKKPGASVKVSCKASGYTFNNYGIIWVRQAPGQGLEWMGWINTYTGKPTYAQKFQGRVTMTTDTSTSTAYMELSSLRSEDTAVYYCARKLFNTVAVTDNAMDYWGQGTTVTVSSGGGGSGGGGSEVQLVESGGGLVQPGGSLRLSCAASGFSFSKYWLGWVRQAPGKGLEWVSDIYPGYDYTHYNEKFKDRFTISADTSKNTAYLQMNSLRAEDTAVYYCARSDGSSTYWGQGTLVTVSS

SEQ ID NO: 401 - protein, 230 aa, Artificial Sequence
  Description of Artificial Sequence: Synthetic polypeptide
DIQMTQSPSSLSASVGDRVTITCRASQDIENYLNWYQQKPGKAPKLLIYYTSRLQSGVPSRFSGSGSGTDFTLTISSLQPEDFATYFCQQGNTQPPTFGQGTKLEIKRGGSGGGGSGDIQMTQSPSSLSASVGDRVTITCTSSQNIVHSNGNTYLEWYQQKPGKAPKLLIYKVSNRFSGVPSRFSGSGSGTDFTLTISSLQPEDFATYYCFQVSHVPYTFGQGTKVEIKR

SEQ ID NO: 402 - protein, 246 aa, Artificial Sequence
  Description of Artificial Sequence: Synthetic polypeptide
EVQLVQSGAEVKKPGASVKVSCKASGYTFNNYGIIWVRQAPGQGLEWMGWINTYTGKPTYAQKFQGRVTMTTDTSTSTAYMELSSLRSEDTAVYYCARKLFNTVAVTDNAMDYWGQGTTVTVSSASTKGPEVQLVESGGGLVQPGGSLRLSCAASGFSFSKYWLGWVRQAPGKGLEWVSDIYPGYDYTHYNEKFKDRFTISADTSKNTAYLQMNSLRAEDTAVYYCARSDGSSTYWGQGTLVTVSS

SEQ ID NO: 403 - protein, 226 aa, Artificial Sequence
  Description of Artificial Sequence: Synthetic polypeptide
DIQMTQSPSSLSASVGDRVTITCRASQDIENYLNWYQQKPGKAPKLLIYYTSRLQSGVPSRFSGSGSGTDFTLTISSLQPEDFATYFCQQGNTQPPTFGQGTKLEIKRTVAAPDIQMTQSPSSLSASVGDRVTITCTSSQNIVHSNGNTYLEWYQQKPGKAPKLLIYKVSNRFSGVPSRFSGSGSGTDFTLTISSLQPEDFATYYCFQVSHVPYTFGQGTKVEIKR

SEQ ID NO: 404 - protein, 246 aa, Artificial Sequence; identical to SEQ ID NO: 402
  Description of Artificial Sequence: Synthetic polypeptide

SEQ ID NO: 405 - protein, 233 aa, Artificial Sequence
  Description of Artificial Sequence: Synthetic polypeptide
DIQMTQSPSSLSASVGDRVTITCRASQDIENYLNWYQQKPGKAPKLLIYYTSRLQSGVPSRFSGSGSGTDFTLTISSLQPEDFATYFCQQGNTQPPTFGQGTKLEIKRTVAAPSVFIFPPDIQMTQSPSSLSASVGDRVTITCTSSQNIVHSNGNTYLEWYQQKPGKAPKLLIYKVSNRFSGVPSRFSGSGSGTDFTLTISSLQPEDFATYYCFQVSHVPYTFGQGTKVEIKR

SEQ ID NO: 406 - protein, 253 aa, Artificial Sequence
  Description of Artificial Sequence: Synthetic polypeptide
EVQLVQSGAEVKKPGASVKVSCKASGYTFNNYGIIWVRQAPGQGLEWMGWINTYTGKPTYAQKFQGRVTMTTDTSTSTAYMELSSLRSEDTAVYYCARKLFNTVAVTDNAMDYWGQGTTVTVSSASTKGPSVFPLAPEVQLVESGGGLVQPGGSLRLSCAASGFSFSKYWLGWVRQAPGKGLEWVSDIYPGYDYTHYNEKFKDRFTISADTSKNTAYLQMNSLRAEDTAVYYCARSDGSSTYWGQGTLVTVSS

SEQ ID NO: 407 - protein, 226 aa, Artificial Sequence; identical to SEQ ID NO: 403
  Description of Artificial Sequence: Synthetic polypeptide

SEQ ID NO: 408 - protein, 250 aa, Artificial Sequence
  Description of Artificial Sequence: Synthetic polypeptide
EVQLVESGGGLVQPGGSLRLSCAASGFSFSKYWLGWVRQAPGKGLEWVSDIYPGYDYTHYNEKFKDRFTISADTSKNTAYLQMNSLRAEDTAVYYCARSDGSSTYWGQGTLVTVSSGGGGSGGGGSEVQLVQSGAEVKKPGASVKVSCKASGYTFNNYGIIWVRQAPGQGLEWMGWINTYTGKPTYAQKFQGRVTMTTDTSTSTAYMELSSLRSEDTAVYYCARKLFNTVAVTDNAMDYWGQGTTVTVSS

SEQ ID NO: 409 - protein, 230 aa, Artificial Sequence
  Description of Artificial Sequence: Synthetic polypeptide
DIQMTQSPSSLSASVGDRVTITCTSSQNIVHSNGNTYLEWYQQKPGKAPKLLIYKVSNRFSGVPSRFSGSGSGTDFTLTISSLQPEDFATYYCFQVSHVPYTFGQGTKVEIKRGGSGGGGSGDIQMTQSPSSLSASVGDRVTITCRASQDIENYLNWYQQKPGKAPKLLIYYTSRLQSGVPSRFSGSGSGTDFTLTISSLQPEDFATYFCQQGNTQPPTFGQGTKLEIKR

SEQ ID NO: 410 - protein, 246 aa, Artificial Sequence
  Description of Artificial Sequence: Synthetic polypeptide
EVQLVESGGGLVQPGGSLRLSCAASGFSFSKYWLGWVRQAPGKGLEWVSDIYPGYDYTHYNEKFKDRFTISADTSKNTAYLQMNSLRAEDTAVYYCARSDGSSTYWGQGTLVTVSSASTKGPEVQLVQSGAEVKKPGASVKVSCKASGYTFNNYGIIWVRQAPGQGLEWMGWINTYTGKPTYAQKFQGRVTMTTDTSTSTAYMELSSLRSEDTAVYYCARKLFNTVAVTDNAMDYWGQGTTVTVSS

SEQ ID NO: 411 - protein, 226 aa, Artificial Sequence
  Description of Artificial Sequence: Synthetic polypeptide
DIQMTQSPSSLSASVGDRVTITCTSSQNIVHSNGNTYLEWYQQKPGKAPKLLIYKVSNRFSGVPSRFSGSGSGTDFTLTISSLQPEDFATYYCFQVSHVPYTFGQGTKVEIKRTVAAPDIQMTQSPSSLSASVGDRVTITCRASQDIENYLNWYQQKPGKAPKLLIYYTSRLQSGVPSRFSGSGSGTDFTLTISSLQPEDFATYFCQQGNTQPPTFGQGTKLEIKR

SEQ ID NO: 412 - protein, 246 aa, Artificial Sequence; identical to SEQ ID NO: 410
  Description of Artificial Sequence: Synthetic polypeptide

SEQ ID NO: 413 - protein, 233 aa, Artificial Sequence
  Description of Artificial Sequence: Synthetic polypeptide
DIQMTQSPSSLSASVGDRVTITCTSSQNIVHSNGNTYLEWYQQKPGKAPKLLIYKVSNRFSGVPSRFSGSGSGTDFTLTISSLQPEDFATYYCFQVSHVPYTFGQGTKVEIKRTVAAPSVFIFPPDIQMTQSPSSLSASVGDRVTITCRASQDIENYLNWYQQKPGKAPKLLIYYTSRLQSGVPSRFSGSGSGTDFTLTISSLQPEDFATYFCQQGNTQPPTFGQGTKLEIKR

SEQ ID NO: 414 - protein, 253 aa, Artificial Sequence
  Description of Artificial Sequence: Synthetic polypeptide
EVQLVESGGGLVQPGGSLRLSCAASGFSFSKYWLGWVRQAPGKGLEWVSDIYPGYDYTHYNEKFKDRFTISADTSKNTAYLQMNSLRAEDTAVYYCARSDGSSTYWGQGTLVTVSSASTKGPSVFPLAPEVQLVQSGAEVKKPGASVKVSCKASGYTFNNYGIIWVRQAPGQGLEWMGWINTYTGKPTYAQKFQGRVTMTTDTSTSTAYMELSSLRSEDTAVYYCARKLFNTVAVTDNAMDYWGQGTTVTVSS

SEQ ID NO: 415 - protein, 226 aa, Artificial Sequence; identical to SEQ ID NO: 411
  Description of Artificial Sequence: Synthetic polypeptide

SEQ ID NO: 416 - protein, 243 aa, Artificial Sequence
  Description of Artificial Sequence: Synthetic polypeptide
EVQLVESGGGLVQPGGSLRLSCAASGFTFSNYGVTWVRQAPGKGLEWVSMIWADGSTHYASSVKGRFTISRDNSKNTLYLQMNSLRAEDTAVYYCAREWQHGPVAYWGQGTLVTVSSGGGGSGGGGSEVQLQQSGPELVTPGASVKISCKASGYTFTKYWLGWVKQSHGKSLEWIGDIYPGYDYTHYNEKFKDTATLTVDKSSSIAYMEIRGLTSEDSAVYYCARSDGSSTYWGQGTLVTVSA

SEQ ID NO: 417 - protein, 230 aa, Artificial Sequence
  Description of Artificial Sequence: Synthetic polypeptide
DIQMTQSPSSLSASVGDRVTITCRASQLVSSAVAWYQQKPGKAPKLLIYWASARHTGVPSRFSGSGSGTDFTLTISSLQPEDFATYYCQQHYKTPFTFGQGTKLEIKRGGSGGGGSGDVQMIQSPSSLSASLGDIVTMTCTSSQNIVHSNGNTYLEWFQQKPGKAPKLLIYKVSNRFSGVPSRFSGSRYGTDFTLTISSLEDEDLATYFCFQVSHVPYTFGGGTKLEIKR

SEQ ID NO: 418 - protein, 239 aa, Artificial Sequence
  Description of Artificial Sequence: Synthetic polypeptide
EVQLVESGGGLVQPGGSLRLSCAASGFTFSNYGVTWVRQAPGKGLEWVSMIWADGSTHYASSVKGRFTISRDNSKNTLYLQMNSLRAEDTAVYYCAREWQHGPVAYWGQGTLVTVSSASTKGPEVQLQQSGPELVTPGASVKISCKASGYTFTKYWLGWVKQSHGKSLEWIGDIYPGYDYTHYNEKFKDTATLTVDKSSSIAYMEIRGLTSEDSAVYYCARSDGSSTYWGQGTLVTVSA

SEQ ID NO: 419 - protein, 226 aa, Artificial Sequence
  Description of Artificial Sequence: Synthetic polypeptide
DIQMTQSPSSLSASVGDRVTITCRASQLVSSAVAWYQQKPGKAPKLLIYWASARHTGVPSRFSGSGSGTDFTLTISSLQPEDFATYYCQQHYKTPFTFGQGTKLEIKRTVAAPDVQMIQSPSSLSASLGDIVTMTCTSSQNIVHSNGNTYLEWFQQKPGKAPKLLIYKVSNRFSGVPSRFSGSRYGTDFTLTISSLEDEDLATYFCFQVSHVPYTFGGGTKLEIKR

SEQ ID NO: 420 - protein, 245 aa, Artificial Sequence
  Description of Artificial Sequence: Synthetic polypeptide
EVQLVESGGGLVQPGGSLRLSCAASGFSFSKYWLGWVRQAPGKGLEWVSDIYPGYDYTHYNEKFKDRFTISADTSKNTAYLQMNSLRAEDTAVYYCARSDGSSTYWGQGTLVTVSSASTKGPSVFPLAPEVQLQQSGPELVTPGASVKISCKASGYTFTKYWLGWVKQSHGKSLEWIGDIYPGYDYTHYNEKFKDTATLTVDKSSSIAYMEIRGLTSEDSAVYYCARSDGSSTYWGQGTLVTVSA

SEQ ID NO: 421 - protein, 231 aa, Artificial Sequence
  Description of Artificial Sequence: Synthetic polypeptide
DIQMTQSPSSLSASVGDRVTITCTSSQNIVHSNGNTYLEWYQQKPGKAPKLLIYKVSNRFSGVPSRFSGSGSGTDFTLTISSLQPEDFATYYCFQVSHVPYTFGQGTKVEIKRTVAAPDVQMIQSPSSLSASLGDIVTMTCTSSQNIVHSNGNTYLEWFQQKPGKAPKLLIYKVSNRFSGVPSRFSGSRYGTDFTLTISSLEDEDLATYFCFQVSHVPYTFGGGTKLEIKR

SEQ ID NO: 422-429 - skipped (8 entries)

SEQ ID NO: 430 - protein, 239 aa, Artificial Sequence
  Description of Artificial Sequence: Synthetic polypeptide
EVQLQQSGPELVTPGASVKISCKASGYTFTKYWLGWVKQSHGKSLEWIGDIYPGYDYTHYNEKFKDTATLTVDKSSSIAYMEIRGLTSEDSAVYYCARSDGSSTYWGQGTLVTVSAASTKGPEVQLVESGGGLVQPGGSLRLSCAASGFTFSNYGVEWVRQAPGKGLEWVSGIWADGSTHYADTVKSRFTISRDNSKNTLYLQMNSLRAEDTAVYYCAREWQHGPVAYWGQGTLVTVSS

SEQ ID NO: 431 - protein, 226 aa, Artificial Sequence
  Description of Artificial Sequence: Synthetic polypeptide
DVQMIQSPSSLSASLGDIVTMTCTSSQNIVHSNGNTYLEWFQQKPGKAPKLLIYKVSNRFSGVPSRFSGSRYGTDFTLTISSLEDEDLATYFCFQVSHVPYTFGGGTKLEIKRTVAAPDIQMTQSPSSLSASVGDRVTITCKASQLVSSAVAWYQQKPGKAPKLLIYWASTLHTGVPSRFSGSGSGTDFTLTISSLQPEDFATYYCQQHYRTPFTFGQGTKLEIKR

SEQ ID NO: 432 - protein, 250 aa, Artificial Sequence
  Description of Artificial Sequence: Synthetic polypeptide
EVQLVQSGAEVKKPGASVKVSCKASGYTFANYGIIWVRQAPGQGLEWMGWINTYTGKPTYAQKFQGRVTMTTDTSTSTAYMELSSLRSEDTAVYYCARKLFTTMDVTDNAMDYWGQGTTVTVSSGGGGSGGGGSEVQLQQSGPELVTPGASVKISCKASGYTFTKYWLGWVKQSHGKSLEWIGDIYPGYDYTHYNEKFKDTATLTVDKSSSIAYMEIRGLTSEDSAVYYCARSDGSSTYWGQGTLVTVSA

SEQ ID NO: 433 - protein, 230 aa, Artificial Sequence
  Description of Artificial Sequence: Synthetic polypeptide
DIQMTQSPSSLSASVGDRVTITCRASQDISQYLNWYQQKPGKAPKLLIYYTSRLQSGVPSRFSGSGSGTDFTLTISSLQPEDFATYFCQQGNTWPPTFGQGTKLEIKRGGSGGGGSGDVQMIQSPSSLSASLGDIVTMTCTSSQNIVHSNGNTYLEWFQQKPGKAPKLLIYKVSNRFSGVPSRFSGSRYGTDFTLTISSLEDEDLATYFCFQVSHVPYTFGGGTKLEIKR

SEQ ID NO: 434 - protein, 246 aa, Artificial Sequence
  Description of Artificial Sequence: Synthetic polypeptide
EVQLVQSGAEVKKPGASVKVSCKASGYTFANYGIIWVRQAPGQGLEWMGWINTYTGKPTYAQKFQGRVTMTTDTSTSTAYMELSSLRSEDTAVYYCARKLFTTMDVTDNAMDYWGQGTTVTVSSASTKGPEVQLQQSGPELVTPGASVKISCKASGYTFTKYWLGWVKQSHGKSLEWIGDIYPGYDYTHYNEKFKDTATLTVDKSSSIAYMEIRGLTSEDSAVYYCARSDGSSTYWGQGTLVTVSA

SEQ ID NO: 435 - protein, 226 aa, Artificial Sequence
  Description of Artificial Sequence: Synthetic polypeptide
DIQMTQSPSSLSASVGDRVTITCRASQDISQYLNWYQQKPGKAPKLLIYYTSRLQSGVPSRFSGSGSGTDFTLTISSLQPEDFATYFCQQGNTWPPTFGQGTKLEIKRTVAAPDVQMIQSPSSLSASLGDIVTMTCTSSQNIVHSNGNTYLEWFQQKPGKAPKLLIYKVSNRFSGVPSRFSGSRYGTDFTLTISSLEDEDLATYFCFQVSHVPYTFGGGTKLEIKR

SEQ ID NO: 436 - protein, 246 aa, Artificial Sequence; identical to SEQ ID NO: 434
  Description of Artificial Sequence: Synthetic polypeptide

SEQ ID NO: 437 - protein, 233 aa, Artificial Sequence
  Description of Artificial Sequence: Synthetic polypeptide
DIQMTQSPSSLSASVGDRVTITCRASQDISQYLNWYQQKPGKAPKLLIYYTSRLQSGVPSRFSGSGSGTDFTLTISSLQPEDFATYFCQQGNTWPPTFGQGTKLEIKRTVAAPSVFIFPPDVQMIQSPSSLSASLGDIVTMTCTSSQNIVHSNGNTYLEWFQQKPGKAPKLLIYKVSNRFSGVPSRFSGSRYGTDFTLTISSLEDEDLATYFCFQVSHVPYTFGGGTKLEIKR

SEQ ID NO: 438 - protein, 253 aa, Artificial Sequence
  Description of Artificial Sequence: Synthetic polypeptide
EVQLVQSGAEVKKPGASVKVSCKASGYTFANYGIIWVRQAPGQGLEWMGWINTYTGKPTYAQKFQGRVTMTTDTSTSTAYMELSSLRSEDTAVYYCARKLFTTMDVTDNAMDYWGQGTTVTVSSASTKGPSVFPLAPEVQLQQSGPELVTPGASVKISCKASGYTFTKYWLGWVKQSHGKSLEWIGDIYPGYDYTHYNEKFKDTATLTVDKSSSIAYMEIRGLTSEDSAVYYCARSDGSSTYWGQGTLVTVSA

SEQ ID NO: 439 - protein, 226 aa, Artificial Sequence; identical to SEQ ID NO: 435
  Description of Artificial Sequence: Synthetic polypeptide

SEQ ID NO: 440 - protein, 249 aa, Artificial Sequence
  Description of Artificial Sequence: Synthetic polypeptide
EVQLVESGGGLVQPGGSLRLSCAASGFTFSNYGVTWVRQAPGKGLEWVSMIWADGSTHYASSVKGRFTISRDNSKNTLYLQMNSLRAEDTAVYYCAREWQHGPVAYWGQGTLVTVSSGGGGSGGGGSEVQLVESGGGLVQPGGSLRLSCAASGFSLTNNNVNWVRQAPGKGLEWVGGVWAGGATDYNSALKSRFTISRDNSKNTAYLQMNSLRAEDTAVYYCARDGGYSSSTLYAMDAWGQGTLVTVSS

SEQ ID NO: 441 - protein, 225 aa, Artificial Sequence
  Description of Artificial Sequence: Synthetic polypeptide
DIQMTQSPSSLSASVGDRVTITCRASQLVSSAVAWYQQKPGKAPKLLIYWASARHTGVPSRFSGSGSGTDFTLTISSLQPEDFATYYCQQHYKTPFTFGQGTKLEIKRGGSGGGGSGDIQMTQSPSSLSASVGDRVTITCRASEDIYNALAWYQQKPGKAPKLLIYNTDTLHTGVPSRFSGSGSGTDYTLTISSLQPEDFATYFCQHYFHYPRTFGQGTKVEIKR

SEQ ID NO: 442 - protein, 245 aa, Artificial Sequence
  Description of Artificial Sequence: Synthetic polypeptide
EVQLVESGGGLVQPGGSLRLSCAASGFTFSNYGVTWVRQAPGKGLEWVSMIWADGSTHYASSVKGRFTISRDNSKNTLYLQMNSLRAEDTAVYYCAREWQHGPVAYWGQGTLVTVSSASTKGPEVQLVESGGGLVQPGGSLRLSCAASGFSLTNNNVNWVRQAPGKGLEWVGGVWAGGATDYNSALKSRFTISRDNSKNTAYLQMNSLRAEDTAVYYCARDGGYSSSTLYAMDAWGQGTLVTVSS

SEQ ID NO: 443 - protein, 221 aa, Artificial Sequence
  Description of Artificial Sequence: Synthetic polypeptide
DIQMTQSPSSLSASVGDRVTITCRASQLVSSAVAWYQQKPGKAPKLLIYWASARHTGVPSRFSGSGSGTDFTLTISSLQPEDFATYYCQQHYKTPFTFGQGTKLEIKRTVAAPDIQMTQSPSSLSASVGDRVTITCRASEDIYNALAWYQQKPGKAPKLLIYNTDTLHTGVPSRFSGSGSGTDYTLTISSLQPEDFATYFCQHYFHYPRTFGQGTKVEIKR

SEQ ID NO: 444 - protein, 245 aa, Artificial Sequence; identical to SEQ ID NO: 442
  Description of Artificial Sequence: Synthetic polypeptide

SEQ ID NO: 445 - protein, 228 aa, Artificial Sequence
  Description of Artificial Sequence: Synthetic polypeptide
DIQMTQSPSSLSASVGDRVTITCRASQLVSSAVAWYQQKPGKAPKLLIYWASARHTGVPSRFSGSGSGTDFTLTISSLQPEDFATYYCQQHYKTPFTFGQGTKLEIKRTVAAPSVFIFPPDIQMTQSPSSLSASVGDRVTITCRASEDIYNALAWYQQKPGKAPKLLIYNTDTLHTGVPSRFSGSGSGTDYTLTISSLQPEDFATYFCQHYFHYPRTFGQGTKVEIKR

SEQ ID NO: 446 - protein, 252 aa, Artificial Sequence
  Description of Artificial Sequence: Synthetic polypeptide
EVQLVESGGGLVQPGGSLRLSCAASGFTFSNYGVTWVRQAPGKGLEWVSMIWADGSTHYASSVKGRFTISRDNSKNTLYLQMNSLRAEDTAVYYCAREWQHGPVAYWGQGTLVTVSSASTKGPSVFPLAPEVQLVESGGGLVQPGGSLRLSCAASGFSLTNNNVNWVRQAPGKGLEWVGGVWAGGATDYNSALKSRFTISRDNSKNTAYLQMNSLRAEDTAVYYCARDGGYSSSTLYAMDAWGQGTLVTVSS

SEQ ID NO: 447 - protein, 221 aa, Artificial Sequence; identical to SEQ ID NO: 443
  Description of Artificial Sequence: Synthetic polypeptide

SEQ ID NO: 448 - protein, 249 aa, Artificial Sequence
  Description of Artificial Sequence: Synthetic polypeptide
EVQLVESGGGLVQPGGSLRLSCAASGFSLTNNNVNWVRQAPGKGLEWVGGVWAGGATDYNSALKSRFTISRDNSKNTAYLQMNSLRAEDTAVYYCARDGGYSSSTLYAMDAWGQGTLVTVSSGGGGSGGGGSEVQLVESGGGLVQPGGSLRLSCAASGFTFSNYGVTWVRQAPGKGLEWVSMIWADGSTHYASSVKGRFTISRDNSKNTLYLQMNSLRAEDTAVYYCAREWQHGPVAYWGQGTLVTVSS

SEQ ID NO: 449 - protein, 225 aa, Artificial Sequence
  Description of Artificial Sequence: Synthetic polypeptide
DIQMTQSPSSLSASVGDRVTITCRASEDIYNALAWYQQKPGKAPKLLIYNTDTLHTGVPSRFSGSGSGTDYTLTISSLQPEDFATYFCQHYFHYPRTFGQGTKVEIKRGGSGGGGSGDIQMTQSPSSLSASVGDRVTITCRASQLVSSAVAWYQQKPGKAPKLLIYWASARHTGVPSRFSGSGSGTDFTLTISSLQPEDFATYYCQQHYKTPFTFGQGTKLEIKR

SEQ ID NO: 450 - protein, 245 aa, Artificial Sequence
  Description of Artificial Sequence: Synthetic polypeptide
EVQLVESGGGLVQPGGSLRLSCAASGFSLTNNNVNWVRQAPGKGLEWVGGVWAGGATDYNSALKSRFTISRDNSKNTAYLQMNSLRAEDTAVYYCARDGGYSSSTLYAMDAWGQGTLVTVSSASTKGPEVQLVESGGGLVQPGGSLRLSCAASGFTFSNYGVTWVRQAPGKGLEWVSMIWADGSTHYASSVKGRFTISRDNSKNTLYLQMNSLRAEDTAVYYCAREWQHGPVAYWGQGTLVTVSS

SEQ ID NO: 451 - protein, 221 aa, Artificial Sequence
  Description of Artificial Sequence: Synthetic polypeptide
DIQMTQSPSSLSASVGDRVTITCRASEDIYNALAWYQQKPGKAPKLLIYNTDTLHTGVPSRFSGSGSGTDYTLTISSLQPEDFATYFCQHYFHYPRTFGQGTKVEIKRTVAAPDIQMTQSPSSLSASVGDRVTITCRASQLVSSAVAWYQQKPGKAPKLLIYWASARHTGVPSRFSGSGSGTDFTLTISSLQPEDFATYYCQQHYKTPFTFGQGTKLEIKR

SEQ ID NO: 452 - protein, 245 aa, Artificial Sequence; identical to SEQ ID NO: 450
  Description of Artificial Sequence: Synthetic polypeptide

SEQ ID NO: 453 - protein, 228 aa, Artificial Sequence
  Description of Artificial Sequence: Synthetic polypeptide
DIQMTQSPSSLSASVGDRVTITCRASEDIYNALAWYQQKPGKAPKLLIYNTDTLHTGVPSRFSGSGSGTDYTLTISSLQPEDFATYFCQHYFHYPRTFGQGTKVEIKRTVAAPSVFIFPPDIQMTQSPSSLSASVGDRVTITCRASQLVSSAVAWYQQKPGKAPKLLIYWASARHTGVPSRFSGSGSGTDFTLTISSLQPEDFATYYCQQHYKTPFTFGQGTKLEIKR

SEQ ID NO: 454 - protein, 252 aa, Artificial Sequence
  Description of Artificial Sequence: Synthetic polypeptide
EVQLVESGGGLVQPGGSLRLSCAASGFSLTNNNVNWVRQAPGKGLEWVGGVWAGGATDYNSALKSRFTISRDNSKNTAYLQMNSLRAEDTAVYYCARDGGYSSSTLYAMDAWGQGTLVTVSSASTKGPSVFPLAPEVQLVESGGGLVQPGGSLRLSCAASGFTFSNYGVTWVRQAPGKGLEWVSMIWADGSTHYASSVKGRFTISRDNSKNTLYLQMNSLRAEDTAVYYCAREWQHGPVAYWGQGTLVTVSS

SEQ ID NO: 455 - protein, 221 aa, Artificial Sequence; identical to SEQ ID NO: 451
  Description of Artificial Sequence: Synthetic polypeptide

SEQ ID NO: 456 - protein, 249 aa, Artificial Sequence
  Description of Artificial Sequence: Synthetic polypeptide
EVQLVESGGGLVQPGGSLRLSCAASGFTFSNYGVEWVRQAPGKGLEWVSGIWADGSTHYADTVKSRFTISRDNSKNTLYLQMNSLRAEDTAVYYCAREWQHGPVAYWGQGTLVTVSSGGGGSGGGGSEVQLVESGGGLVQPGGSLRLSCAASGFSLTNNNVNWVRQAPGKGLEWVGGVWAGGATDYNSALKSRFTISRDNSKNTAYLQMNSLRAEDTAVYYCARDGGYSSSTLYAMDAWGQGTLVTVSS

SEQ ID NO: 457 - protein, 225 aa, Artificial Sequence
  Description of Artificial Sequence: Synthetic polypeptide
DIQMTQSPSSLSASVGDRVTITCKASQLVSSAVAWYQQKPGKAPKLLIYWASTLHTGVPSRFSGSGSGTDFTLTISSLQPEDFATYYCQQHYRTPFTFGQGTKLEIKRGGSGGGGSGDIQMTQSPSSLSASVGDRVTITCRASEDIYNALAWYQQKPGKAPKLLIYNTDTLHTGVPSRFSGSGSGTDYTLTISSLQPEDFATYFCQHYFHYPRTFGQGTKVEIKR

SEQ ID NO: 458 - protein, 245 aa, Artificial Sequence
  Description of Artificial Sequence: Synthetic polypeptide
EVQLVESGGGLVQPGGSLRLSCAASGFTFSNYGVEWVRQAPGKGLEWVSGIWADGSTHYADTVKSRFTISRDNSKNTLYLQMNSLRAEDTAVYYCAREWQHGPVAYWGQGTLVTVSSASTKGPEVQLVESGGGLVQPGGSLRLSCAASGFSLTNNNVNWVRQAPGKGLEWVGGVWAGGATDYNSALKSRFTISRDNSKNTAYLQMNSLRAEDTAVYYCARDGGYSSSTLYAMDAWGQGTLVTVSS

SEQ ID NO: 459 - protein, 221 aa, Artificial Sequence
  Description of Artificial Sequence: Synthetic polypeptide
DIQMTQSPSSLSASVGDRVTITCKASQLVSSAVAWYQQKPGKAPKLLIYWASTLHTGVPSRFSGSGSGTDFTLTISSLQPEDFATYYCQQHYRTPFTFGQGTKLEIKRTVAAPDIQMTQSPSSLSASVGDRVTITCRASEDIYNALAWYQQKPGKAPKLLIYNTDTLHTGVPSRFSGSGSGTDYTLTISSLQPEDFATYFCQHYFHYPRTFGQGTKVEIKR

SEQ ID NO: 460 - protein, 245 aa, Artificial Sequence; identical to SEQ ID NO: 458
  Description of Artificial Sequence: Synthetic polypeptide

SEQ ID NO: 461 - protein, 228 aa, Artificial Sequence
  Description of Artificial Sequence: Synthetic polypeptide
DIQMTQSPSSLSASVGDRVTITCKASQLVSSAVAWYQQKPGKAPKLLIYWASTLHTGVPSRFSGSGSGTDFTLTISSLQPEDFATYYCQQHYRTPFTFGQGTKLEIKRTVAAPSVFIFPPDIQMTQSPSSLSASVGDRVTITCRASEDIYNALAWYQQKPGKAPKLLIYNTDTLHTGVPSRFSGSGSGTDYTLTISSLQPEDFATYFCQHYFHYPRTFGQGTKVEIKR

SEQ ID NO: 462 - protein, 252 aa, Artificial Sequence
  Description of Artificial Sequence: Synthetic polypeptide
EVQLVESGGGLVQPGGSLRLSCAASGFTFSNYGVEWVRQAPGKGLEWVSGIWADGSTHYADTVKSRFTISRDNSKNTLYLQMNSLRAEDTAVYYCAREWQHGPVAYWGQGTLVTVSSASTKGPSVFPLAPEVQLVESGGGLVQPGGSLRLSCAASGFSLTNNNVNWVRQAPGKGLEWVGGVWAGGATDYNSALKSRFTISRDNSKNTAYLQMNSLRAEDTAVYYCARDGGYSSSTLYAMDAWGQGTLVTVSS

SEQ ID NO: 463 - protein, 221 aa, Artificial Sequence; identical to SEQ ID NO: 459
  Description of Artificial Sequence: Synthetic polypeptide

SEQ ID NO: 464 - protein, 249 aa, Artificial Sequence
  Description of Artificial Sequence: Synthetic polypeptide
EVQLVESGGGLVQPGGSLRLSCAASGFSLTNNNVNWVRQAPGKGLEWVGGVWAGGATDYNSALKSRFTISRDNSKNTAYLQMNSLRAEDTAVYYCARDGGYSSSTLYAMDAWGQGTLVTVSSGGGGSGGGGSEVQLVESGGGLVQPGGSLRLSCAASGFTFSNYGVEWVRQAPGKGLEWVSGIWADGSTHYADTVKSRFTISRDNSKNTLYLQMNSLRAEDTAVYYCAREWQHGPVAYWGQGTLVTVSS

SEQ ID NO: 465 - protein, 225 aa, Artificial Sequence
  Description of Artificial Sequence: Synthetic polypeptide
DIQMTQSPSSLSASVGDRVTITCRASEDIYNALAWYQQKPGKAPKLLIYNTDTLHTGVPSRFSGSGSGTDYTLTISSLQPEDFATYFCQHYFHYPRTFGQGTKVEIKRGGSGGGGSGDIQMTQSPSSLSASVGDRVTITCKASQLVSSAVAWYQQKPGKAPKLLIYWASTLHTGVPSRFSGSGSGTDFTLTISSLQPEDFATYYCQQHYRTPFTFGQGTKLEIKR

SEQ ID NO: 466 - protein, 245 aa, Artificial Sequence
  Description of Artificial Sequence: Synthetic polypeptide
EVQLVESGGGLVQPGGSLRLSCAASGFSLTNNNVNWVRQAPGKGLEWVGGVWAGGATDYNSALKSRFTISRDNSKNTAYLQMNSLRAEDTAVYYCARDGGYSSSTLYAMDAWGQGTLVTVSSASTKGPEVQLVESGGGLVQPGGSLRLSCAASGFTFSNYGVEWVRQAPGKGLEWVSGIWADGSTHYADTVKSRFTISRDNSKNTLYLQMNSLRAEDTAVYYCAREWQHGPVAYWGQGTLVTVSS

SEQ ID NO: 467 - protein, 221 aa, Artificial Sequence
  Description of Artificial Sequence: Synthetic polypeptide
DIQMTQSPSSLSASVGDRVTITCRASEDIYNALAWYQQKPGKAPKLLIYNTDTLHTGVPSRFSGSGSGTDYTLTISSLQPEDFATYFCQHYFHYPRTFGQGTKVEIKRTVAAPDIQMTQSPSSLSASVGDRVTITCKASQLVSSAVAWYQQKPGKAPKLLIYWASTLHTGVPSRFSGSGSGTDFTLTISSLQPEDFATYYCQQHYRTPFTFGQGTKLEIKR

SEQ ID NO: 468 - protein, 245 aa, Artificial Sequence; identical to SEQ ID NO: 466
  Description of Artificial Sequence: Synthetic polypeptide

SEQ ID NO: 469 - protein, 228 aa, Artificial Sequence
  Description of Artificial Sequence: Synthetic polypeptide
DIQMTQSPSSLSASVGDRVTITCRASEDIYNALAWYQQKPGKAPKLLIYNTDTLHTGVPSRFSGSGSGTDYTLTISSLQPEDFATYFCQHYFHYPRTFGQGTKVEIKRTVAAPSVFIFPPDIQMTQSPSSLSASVGDRVTITCKASQLVSSAVAWYQQKPGKAPKLLIYWASTLHTGVPSRFSGSGSGTDFTLTISSLQPEDFATYYCQQHYRTPFTFGQGTKLEIKR

SEQ ID NO: 470 - protein, 252 aa, Artificial Sequence
  Description of Artificial Sequence: Synthetic polypeptide
EVQLVESGGGLVQPGGSLRLSCAASGFSLTNNNVNWVRQAPGKGLEWVGGVWAGGATDYNSALKSRFTISRDNSKNTAYLQMNSLRAEDTAVYYCARDGGYSSSTLYAMDAWGQGTLVTVSSASTKGPSVFPLAPEVQLVESGGGLVQPGGSLRLSCAASGFTFSNYGVEWVRQAPGKGLEWVSGIWADGSTHYADTVKSRFTISRDNSKNTLYLQMNSLRAEDTAVYYCAREWQHGPVAYWGQGTLVTVSS

SEQ ID NO: 471 - protein, 221 aa, Artificial Sequence; identical to SEQ ID NO: 467
  Description of Artificial Sequence: Synthetic polypeptide

SEQ ID NO: 472 - protein, 256 aa, Artificial Sequence
  Description of Artificial Sequence: Synthetic polypeptide
EVQLVQSGAEVKKPGASVKVSCKASGYTFANYGIIWVRQAPGQGLEWMGWINTYTGKPTYAQKFQGRVTMTTDTSTSTAYMELSSLRSEDTAVYYCARKLFTTMDVTDNAMDYWGQGTTVTVSSGGGGSGGGGSEVQLVESGGGLVQPGGSLRLSCAASGFSLTNNNVNWVRQAPGKGLEWVGGVWAGGATDYNSALKSRFTISRDNSKNTAYLQMNSLRAEDTAVYYCARDGGYSSSTLYAMDAWGQGTLVTVSS

SEQ ID NO: 473 - protein, 225 aa, Artificial Sequence
  Description of Artificial Sequence: Synthetic polypeptide
DIQMTQSPSSLSASVGDRVTITCRASQDISQYLNWYQQKPGKAPKLLIYYTSRLQSGVPSRFSGSGSGTDFTLTISSLQPEDFATYFCQQGNTWPPTFGQGTKLEIKRGGSGGGGSGDIQMTQSPSSLSASVGDRVTITCRASEDIYNALAWYQQKPGKAPKLLIYNTDTLHTGVPSRFSGSGSGTDYTLTISSLQPEDFATYFCQHYFHYPRTFGQGTKVEIKR

SEQ ID NO: 474 - protein, 252 aa, Artificial Sequence
  Description of Artificial Sequence: Synthetic polypeptide
EVQLVQSGAEVKKPGASVKVSCKASGYTFANYGIIWVRQAPGQGLEWMGWINTYTGKPTYAQKFQGRVTMTTDTSTSTAYMELSSLRSEDTAVYYCARKLFTTMDVTDNAMDYWGQGTTVTVSSASTKGPEVQLVESGGGLVQPGGSLRLSCAASGFSLTNNNVNWVRQAPGKGLEWVGGVWAGGATDYNSALKSRFTISRDNSKNTAYLQMNSLRAEDTAVYYCARDGGYSSSTLYAMDAWGQGTLVTVSS

SEQ ID NO: 475 - protein, 221 aa, Artificial Sequence
  Description of Artificial Sequence: Synthetic polypeptide
DIQMTQSPSSLSASVGDRVTITCRASQDISQYLNWYQQKPGKAPKLLIYYTSRLQSGVPSRFSGSGSGTDFTLTISSLQPEDFATYFCQQGNTWPPTFGQGTKLEIKRTVAAPDIQMTQSPSSLSASVGDRVTITCRASEDIYNALAWYQQKPGKAPKLLIYNTDTLHTGVPSRFSGSGSGTDYTLTISSLQPEDFATYFCQHYFHYPRTFGQGTKVEIKR

SEQ ID NO: 476 - protein, 252 aa, Artificial Sequence; identical to SEQ ID NO: 474
  Description of Artificial Sequence: Synthetic polypeptide

SEQ ID NO: 477 - protein, 228 aa, Artificial Sequence
  Description of Artificial Sequence: Synthetic polypeptide
DIQMTQSPSSLSASVGDRVTITCRASQDISQYLNWYQQKPGKAPKLLIYYTSRLQSGVPSRFSGSGSGTDFTLTISSLQPEDFATYFCQQGNTWPPTFGQGTKLEIKRTVAAPSVFIFPPDIQMTQSPSSLSASVGDRVTITCRASEDIYNALAWYQQKPGKAPKLLIYNTDTLHTGVPSRFSGSGSGTDYTLTISSLQPEDFATYFCQHYFHYPRTFGQGTKVEIKR

SEQ ID NO: 478 - protein, 259 aa, Artificial Sequence
  Description of Artificial Sequence: Synthetic polypeptide
EVQLVQSGAEVKKPGASVKVSCKASGYTFANYGIIWVRQAPGQGLEWMGWINTYTGKPTYAQKFQGRVTMTTDTSTSTAYMELSSLRSEDTAVYYCARKLFTTMDVTDNAMDYWGQGTTVTVSSASTKGPSVFPLAPEVQLVESGGGLVQPGGSLRLSCAASGFSLTNNNVNWVRQAPGKGLEWVGGVWAGGATDYNSALKSRFTISRDNSKNTAYLQMNSLRAEDTAVYYCARDGGYSSSTLYAMDAWGQGTLVTVSS

SEQ ID NO: 479 - protein, 221 aa, Artificial Sequence; identical to SEQ ID NO: 475
  Description of Artificial Sequence: Synthetic polypeptide

SEQ ID NO: 480 - protein, 256 aa, Artificial Sequence
  Description of Artificial Sequence: Synthetic polypeptide
EVQLVESGGGLVQPGGSLRLSCAASGFSLTNNNVNWVRQAPGKGLEWVGGVWAGGATDYNSALKSRFTISRDNSKNTAYLQMNSLRAEDTAVYYCARDGGYSSSTLYAMDAWGQGTLVTVSSGGGGSGGGGSEVQLVQSGAEVKKPGASVKVSCKASGYTFANYGIIWVRQAPGQGLEWMGWINTYTGKPTYAQKFQGRVTMTTDTSTSTAYMELSSLRSEDTAVYYCARKLFTTMDVTDNAMDYWGQGTTVTVSS

SEQ ID NO: 481 - protein, 225 aa, Artificial Sequence
  Description of Artificial Sequence: Synthetic polypeptide
DIQMTQSPSSLSASVGDRVTITCRASEDIYNALAWYQQKPGKAPKLLIYNTDTLHTGVPSRFSGSGSGTDYTLTISSLQPEDFATYFCQHYFHYPRTFGQGTKVEIKRGGSGGGGSGDIQMTQSPSSLSASVGDRVTITCRASQDISQYLNWYQQKPGKAPKLLIYYTSRLQSGVPSRFSGSGSGTDFTLTISSLQPEDFATYFCQQGNTWPPTFGQGTKLEIKR

SEQ ID NO: 482 - protein, 252 aa, Artificial Sequence
  Description of Artificial Sequence: Synthetic polypeptide
EVQLVESGGGLVQPGGSLRLSCAASGFSLTNNNVNWVRQAPGKGLEWVGGVWAGGATDYNSALKSRFTISRDNSKNTAYLQMNSLRAEDTAVYYCARDGGYSSSTLYAMDAWGQGTLVTVSSASTKGPEVQLVQSGAEVKKPGASVKVSCKASGYTFANYGIIWVRQAPGQGLEWMGWINTYTGKPTYAQKFQGRVTMTTDTSTSTAYMELSSLRSEDTAVYYCARKLFTTMDVTDNAMDYWGQGTTVTVSS

SEQ ID NO: 483 - protein, 221 aa, Artificial Sequence
  Description of Artificial Sequence: Synthetic polypeptide
DIQMTQSPSSLSASVGDRVTITCRASEDIYNALAWYQQKPGKAPKLLIYNTDTLHTGVPSRFSGSGSGTDYTLTISSLQPEDFATYFCQHYFHYPRTFGQGTKVEIKRTVAAPDIQMTQSPSSLSASVGDRVTITCRASQDISQYLNWYQQKPGKAPKLLIYYTSRLQSGVPSRFSGSGSGTDFTLTISSLQPEDFATYFCQQGNTWPPTFGQGTKLEIKR

SEQ ID NO: 484 - protein, 252 aa, Artificial Sequence; identical to SEQ ID NO: 482
  Description of Artificial Sequence: Synthetic polypeptide

SEQ ID NO: 485 - protein, 228 aa, Artificial Sequence
  Description of Artificial Sequence: Synthetic polypeptide
DIQMTQSPSSLSASVGDRVTITCRASEDIYNALAWYQQKPGKAPKLLIYNTDTLHTGVPSRFSGSGSGTDYTLTISSLQPEDFATYFCQHYFHYPRTFGQGTKVEIKRTVAAPSVFIFPPDIQMTQSPSSLSASVGDRVTITCRASQDISQYLNWYQQKPGKAPKLLIYYTSRLQSGVPSRFSGSGSGTDFTLTISSLQPEDFATYFCQQGNTWPPTFGQGTKLEIKR

SEQ ID NO: 486 - protein, 259 aa, Artificial Sequence
  Description of Artificial Sequence: Synthetic polypeptide
EVQLVESGGGLVQPGGSLRLSCAASGFSLTNNNVNWVRQAPGKGLEWVGGVWAGGATDYNSALKSRFTISRDNSKNTAYLQMNSLRAEDTAVYYCARDGGYSSSTLYAMDAWGQGTLVTVSSASTKGPSVFPLAPEVQLVQSGAEVKKPGASVKVSCKASGYTFANYGIIWVRQAPGQGLEWMGWINTYTGKPTYAQKFQGRVTMTTDTSTSTAYMELSSLRSEDTAVYYCARKLFTTMDVTDNAMDYWGQGTTVTVSS

SEQ ID NO: 487 - protein, 221 aa, Artificial Sequence; identical to SEQ ID NO: 483
  Description of Artificial Sequence: Synthetic polypeptide

SEQ ID NO: 488 - protein, 256 aa, Artificial Sequence
  Description of Artificial Sequence: Synthetic polypeptide
EVQLVQSGAEVKKPGASVKVSCKASGYTFNNYGIIWVRQAPGQGLEWMGWINTYTGKPTYAQKFQGRVTMTTDTSTSTAYMELSSLRSEDTAVYYCARKLFNTVAVTDNAMDYWGQGTTVTVSSGGGGSGGGGSEVQLVESGGGLVQPGGSLRLSCAASGFSLTNNNVNWVRQAPGKGLEWVGGVWAGGATDYNSALKSRFTISRDNSKNTAYLQMNSLRAEDTAVYYCARDGGYSSSTLYAMDAWGQGTLVTVSS

SEQ ID NO: 489 - protein, 225 aa, Artificial Sequence
  Description of Artificial Sequence: Synthetic polypeptide
DIQMTQSPSSLSASVGDRVTITCRASQDIENYLNWYQQKPGKAPKLLIYYTSRLQSGVPSRFSGSGSGTDFTLTISSLQPEDFATYFCQQGNTQPPTFGQGTKLEIKRGGSGGGGSGDIQMTQSPSSLSASVGDRVTITCRASEDIYNALAWYQQKPGKAPKLLIYNTDTLHTGVPSRFSGSGSGTDYTLTISSLQPEDFATYFCQHYFHYPRTFGQGTKVEIKR

SEQ ID NO: 490 - protein, 252 aa, Artificial Sequence
  Description of Artificial Sequence: Synthetic polypeptide
EVQLVQSGAEVKKPGASVKVSCKASGYTFNNYGIIWVRQAPGQGLEWMGWINTYTGKPTYAQKFQGRVTMTTDTSTSTAYMELSSLRSEDTAVYYCARKLFNTVAVTDNAMDYWGQGTTVTVSSASTKGPEVQLVESGGGLVQPGGSLRLSCAASGFSLTNNNVNWVRQAPGKGLEWVGGVWAGGATDYNSALKSRFTISRDNSKNTAYLQMNSLRAEDTAVYYCARDGGYSSSTLYAMDAWGQGTLVTVSS

SEQ ID NO: 491 - protein, 221 aa, Artificial Sequence
  Description of Artificial Sequence: Synthetic polypeptide
DIQMTQSPSSLSASVGDRVTITCRASQDIENYLNWYQQKPGKAPKLLIYYTSRLQSGVPSRFSGSGSGTDFTLTISSLQPEDFATYFCQQGNTQPPTFGQGTKLEIKRTVAAPDIQMTQSPSSLSASVGDRVTITCRASEDIYNALAWYQQKPGKAPKLLIYNTDTLHTGVPSRFSGSGSGTDYTLTISSLQPEDFATYFCQHYFHYPRTFGQGTKVEIKR

SEQ ID NO: 492 - protein, 252 aa, Artificial Sequence; identical to SEQ ID NO: 490
  Description of Artificial Sequence: Synthetic polypeptide

SEQ ID NO: 493 - protein, 228 aa, Artificial Sequence
  Description of Artificial Sequence: Synthetic polypeptide
DIQMTQSPSSLSASVGDRVTITCRASQDIENYLNWYQQKPGKAPKLLIYYTSRLQSGVPSRFSGSGSGTDFTLTISSLQPEDFATYFCQQGNTQPPTFGQGTKLEIKRTVAAPSVFIFPPDIQMTQSPSSLSASVGDRVTITCRASEDIYNALAWYQQKPGKAPKLLIYNTDTLHTGVPSRFSGSGSGTDYTLTISSLQPEDFATYFCQHYFHYPRTFGQGTKVEIKR

SEQ ID NO: 494 - protein, 259 aa, Artificial Sequence
  Description of Artificial Sequence: Synthetic polypeptide
EVQLVQSGAEVKKPGASVKVSCKASGYTFNNYGIIWVRQAPGQGLEWMGWINTYTGKPTYAQKFQGRVTMTTDTSTSTAYMELSSLRSEDTAVYYCARKLFNTVAVTDNAMDYWGQGTTVTVSSASTKGPSVFPLAPEVQLVESGGGLVQPGGSLRLSCAASGFSLTNNNVNWVRQAPGKGLEWVGGVWAGGATDYNSALKSRFTISRDNSKNTAYLQMNSLRAEDTAVYYCARDGGYSSSTLYAMDAWGQGTLVTVSS

SEQ ID NO: 495 - protein, 221 aa, Artificial Sequence; identical to SEQ ID NO: 491
  Description of Artificial Sequence: Synthetic polypeptide

SEQ ID NO: 496 - protein, 256 aa, Artificial Sequence
  Description of Artificial Sequence: Synthetic polypeptide
EVQLVESGGGLVQPGGSLRLSCAASGFSLTNNNVNWVRQAPGKGLEWVGGVWAGGATDYNSALKSRFTISRDNSKNTAYLQMNSLRAEDTAVYYCARDGGYSSSTLYAMDAWGQGTLVTVSSGGGGSGGGGSEVQLVQSGAEVKKPGASVKVSCKASGYTFNNYGIIWVRQAPGQGLEWMGWINTYTGKPTYAQKFQGRVTMTTDTSTSTAYMELSSLRSEDTAVYYCARKLFNTVAVTDNAMDYWGQGTTVTVSS

SEQ ID NO: 497 - protein, 225 aa, Artificial Sequence
  Description of Artificial Sequence: Synthetic polypeptide
DIQMTQSPSSLSASVGDRVTITCRASEDIYNALAWYQQKPGKAPKLLIYNTDTLHTGVPSRFSGSGSGTDYTLTISSLQPEDFATYFCQHYFHYPRTFGQGTKVEIKRGGSGGGGSGDIQMTQSPSSLSASVGDRVTITCRASQDIENYLNWYQQKPGKAPKLLIYYTSRLQSGVPSRFSGSGSGTDFTLTISSLQPEDFATYFCQQGNTQPPTFGQGTKLEIKR

SEQ ID NO: 498 - protein, 252 aa, Artificial Sequence
  Description of Artificial Sequence: Synthetic polypeptide
EVQLVESGGGLVQPGGSLRLSCAASGFSLTNNNVNWVRQAPGKGLEWVGGVWAGGATDYNSALKSRFTISRDNSKNTAYLQMNSLRAEDTAVYYCARDGGYSSSTLYAMDAWGQGTLVTVSSASTKGPEVQLVQSGAEVKKPGASVKVSCKASGYTFNNYGIIWVRQAPGQGLEWMGWINTYTGKPTYAQKFQGRVTMTTDTSTSTAYMELSSLRSEDTAVYYCARKLFNTVAVTDNAMDYWGQGTTVTVSS

SEQ ID NO: 499 - protein, 221 aa, Artificial Sequence
  Description of Artificial Sequence: Synthetic polypeptide
DIQMTQSPSSLSASVGDRVTITCRASEDIYNALAWYQQKPGKAPKLLIYNTDTLHTGVPSRFSGSGSGTDYTLTISSLQPEDFATYFCQHYFHYPRTFGQGTKVEIKRTVAAPDIQMTQSPSSLSASVGDRVTITCRASQDIENYLNWYQQKPGKAPKLLIYYTSRLQSGVPSRFSGSGSGTDFTLTISSLQPEDFATYFCQQGNTQPPTFGQGTKLEIKR

SEQ ID NO: 500 - protein, 252 aa, Artificial Sequence; identical to SEQ ID NO: 498
  Description of Artificial Sequence: Synthetic polypeptide

SEQ ID NO: 501 - protein, 228 aa, Artificial Sequence
  Description of Artificial Sequence: Synthetic polypeptide
DIQMTQSPSSLSASVGDRVTITCRASEDIYNALAWYQQKPGKAPKLLIYNTDTLHTGVPSRFSGSGSGTDYTLTISSLQPEDFATYFCQHYFHYPRTFGQGTKVEIKRTVAAPSVFIFPPDIQMTQSPSSLSASVGDRVTITCRASQDIENYLNWYQQKPGKAPKLLIYYTSRLQSGVPSRFSGSGSGTDFTLTISSLQPEDFATYFCQQGNTQPPTFGQGTKLEIKR

SEQ ID NO: 502 - protein, 259 aa, Artificial Sequence
  Description of Artificial Sequence: Synthetic polypeptide
EVQLVESGGGLVQPGGSLRLSCAASGFSLTNNNVNWVRQAPGKGLEWVGGVWAGGATDYNSALKSRFTISRDNSKNTAYLQMNSLRAEDTAVYYCARDGGYSSSTLYAMDAWGQGTLVTVSSASTKGPSVFPLAPEVQLVQSGAEVKKPGASVKVSCKASGYTFNNYGIIWVRQAPGQGLEWMGWINTYTGKPTYAQKFQGRVTMTTDTSTSTAYMELSSLRSEDTAVYYCARKLFNTVAVTDNAMDYWGQGTTVTVSS

SEQ ID NO: 503 - protein, 221 aa, Artificial Sequence; identical to SEQ ID NO: 499
  Description of Artificial Sequence: Synthetic polypeptide

SEQ ID NO: 504 - protein, 330 aa, Homo sapiens
ASTKGPSVFPLAPSSKSTSGGTAALGCLVKDYFPEPVTVSWNSGALTSGVHTFPAVLQSSGLYSLSSVVTVPSSSLGTQTYICNVNHKPSNTKVDKKVEPKSCDKTHTCPPCPAPELLGGPSVFLFPPKPKDTLMISRTPEVTCVVVDVSHEDPEVKFNWYVDGVEVHNAKTKPREEQYNSTYRVVSVLTVLHQDWLNGKEYKCKVSNKALPAPIEKTISKAKGQPREPQVYTLPPSREEMTKNQVSLTCLVKGFYPSDIAVEWESNGQPENNYKTTPPVLDSDGSFFLYSKLTVDKSRWQQGNVFSCSVMHEALHNHYTQKSLSLSPGK

SEQ ID NO: 505 - protein, 106 aa, Homo sapiens
TVAAPSVFIFPPSDEQLKSGTASVVCLLNNFYPREAKVQWKVDNALQSGNSQESVTEQDSKDSTYSLSSTLTLSKADYEKHKVYACEVTHQGLSSPVTKSFNRGEC

1-34. (canceled)

35. A binding protein comprising first and second polypeptide chains, each independently comprising VD1-(X1)n-VD2-C-X2, wherein
VD1 is a first variable domain;
VD2 is a second variable domain;
C is a constant domain;
X1 is a linker;
X2 is an Fc region that is either present or absent;
n is 0 or 1,
wherein the VD1 domains on the first and second polypeptide chains form a first functional target binding site and the VD2 domains on the first and second polypeptide chains form a second functional target binding site, and wherein the binding protein is capable of binding
(a) TNFα and IL-13, wherein
(i) the variable domains that form a functional target binding site for TNFα comprise a sequence selected from the group consisting of SEQ ID NOs: 38-43 and 48-49, and
(ii) the variable domains that form a functional target binding site for IL-13 comprise a sequence selected from the group consisting of SEQ ID NO: 32-37;
(b) TNFα and PGE2, wherein
(i) the variable domains that form a functional target binding site for TNFα comprise a sequence selected from the group consisting of SEQ ID NOs: 38-43 and 48-49, and
(ii) the variable domains that form a functional target binding site for PGE2 comprise a sequence selected from the group consisting of SEQ ID NO: 50-55;
or
(c) TNFα and NGF, wherein
(i) the variable domains that form a functional target binding site for TNFα comprise a sequence selected from the group consisting of SEQ ID NOs: 38-43 and 48-49, and
(ii) the variable domains that form a functional target binding site for NGF comprise a sequence selected from the group consisting of SEQ ID NO: 56-57.

36. A binding protein comprising first and second polypeptide chains, each independently comprising VD1-(X1)n-VD2-C-X2, wherein
VD1 is a first variable domain;
VD2 is a second variable domain;
C is a constant domain;
X1 is a linker;
X2 is an Fc region that is either present or absent;
n is 0 or 1,
wherein the VD1 domains on the first and second polypeptide chains form a first functional target binding site and the VD2 domains on the first and second polypeptide chains form a second functional target binding site, and wherein the binding protein is capable of binding
(a) TNFα and IL-13, wherein
(i) the variable domains that form a functional target binding site for TNFα comprise:
CDRs 1-3 from SEQ ID NO: 38 and CDRs 1-3 from SEQ ID NO: 39,
CDRs 1-3 from SEQ ID NO: 40 and CDRs 1-3 from SEQ ID NO: 41,
CDRs 1-3 from SEQ ID NO: 42 and CDRs 1-3 from SEQ ID NO: 43, or
CDRs 1-3 from SEQ ID NO: 48 and CDRs 1-3 from SEQ ID NO: 49;
and
(ii) the variable domains that form a functional target binding site for IL-13 comprise
CDRs 1-3 from SEQ ID NO: 32 and CDRs 1-3 from SEQ ID NO: 33;
CDRs 1-3 from SEQ ID NO: 34 and CDRs 1-3 from SEQ ID NO: 35; or
CDRs 1-3 from SEQ ID NO: 36 and CDRs 1-3 from SEQ ID NO: 37;
(b) TNFα and PGE2, wherein
(i) the variable domains that form a functional target binding site for TNFα comprise:
CDRs 1-3 from SEQ ID NO: 38 and three CDRs from SEQ ID NO: 39,
CDRs 1-3 from SEQ ID NO: 40 and three CDRs from SEQ ID NO: 41,
CDRs 1-3 from SEQ ID NO: 42 and three CDRs from SEQ ID NO: 43, or
CDRs 1-3 from SEQ ID NO: 48 and CDRs 1-3 from SEQ ID NO: 49;
and
(ii) the variable domains that form a functional target binding site for PGE2 comprise
CDRs 1-3 from SEQ ID NO: 50 and CDRs 1-3 from SEQ ID NO: 51;
CDRs 1-3 from SEQ ID NO: 52 and CDRs 1-3 from SEQ ID NO: 53; or
CDRs 1-3 from SEQ ID NO: 54 and CDRs 1-3 from SEQ ID NO: 55;
or
(c) TNFα and NGF, wherein
(i) the variable domains that form a functional target binding site for TNFα comprise;
CDRs 1-3 from SEQ ID NO: 38 and CDRs 1-3 from SEQ ID NO: 39,
CDRs 1-3 from SEQ ID NO: 40 and CDRs 1-3 from SEQ ID NO: 41,
CDRs 1-3 from SEQ ID NO: 42 and CDRs 1-3 from SEQ ID NO: 43, or
CDRs 1-3 from SEQ ID NO: 48 and CDRs 1-3 from SEQ ID NO: 49;
and
(ii) the variable domains that form a functional target binding site for NGF comprise
CDRs 1-3 from SEQ ID NO: 56 and CDRs 1-3 from SEQ ID NO: 57.

37. The binding protein of claim 36, wherein the first polypeptide chain comprises a first VD1-(X1)n-VD2-C-X2, wherein
VD1 is a first heavy chain variable domain;
VD2 is a second heavy chain variable domain;
C is a heavy chain constant domain;
X1 is a linker;
X2 is an Fc region that is either present or absent;
n is 0 or 1, and
wherein the second polypeptide chain comprises a second VD1-(X1)n-VD2-C, wherein
VD1 is a first light chain variable domain;
VD2 is a second light chain variable domain;
C is a light chain constant domain;
X1 is a linker;
n is 0 or 1,
wherein the VD1 domains on the first and second polypeptide chains form a first functional target binding site and the VD2 domains on the first and second polypeptide chains form a second functional target binding site.

38. The binding protein of claim 36, wherein the binding protein is capable of binding:
(a) TNFα and IL-13, wherein
(i) the variable domains that form a functional target binding site for TNFα comprise:
SEQ ID NO: 38 and SEQ ID NO: 39,
SEQ ID NO: 40 and SEQ ID NO: 41,
SEQ ID NO: 42 and SEQ ID NO: 43, or
SEQ ID NO: 48 and SEQ ID NO: 49;
and
(ii) the variable domains that form a functional target binding site for IL-13 comprise
SEQ ID NO: 32 and SEQ ID NO: 33;
SEQ ID NO: 34 and SEQ ID NO: 35; or
SEQ ID NO: 36 and SEQ ID NO: 37;
(b) TNFα and PGE2, wherein
(i) the variable domains that form a functional target binding site for TNFα comprise:
SEQ ID NO: 38 and SEQ ID NO: 39,
SEQ ID NO: 40 and SEQ ID NO: 41,
SEQ ID NO: 42 and SEQ ID NO: 43, or
SEQ ID NO: 48 and SEQ ID NO: 49;
and
(ii) the variable domains that form a functional target binding site for PGE2 comprise
SEQ ID NO: 50 and SEQ ID NO: 51;
SEQ ID NO: 52 and SEQ ID NO: 53; or
SEQ ID NO: 54 and SEQ ID NO: 55;
or
(c) TNFα and NGF, wherein
(i) the variable domains that form a functional target binding site for TNFα comprise:
SEQ ID NO: 38 and SEQ ID NO: 39,
SEQ ID NO: 40 and SEQ ID NO: 41,
SEQ ID NO: 42 and SEQ ID NO: 43, or
SEQ ID NO: 48 and SEQ ID NO: 49;
and
(ii) the variable domains that form a functional target binding site for NGF comprise
SEQ ID NO: 56 and SEQ ID NO: 57.

39. The binding protein of claim 36, wherein
(a) the binding protein is capable of binding TNFα and IL-13, wherein the binding protein is capable of binding TNFα with a K_{D} of at most about 5.8×10⁻¹¹ M, as measured by surface plasmon resonance, and/or the binding protein is capable of binding IL-13 with a K_{D} of at most about 1.2×10⁻⁹ M, as measured by surface plasmon resonance;
(b) the binding protein is capable of binding TNFα and PGE2, wherein the binding protein is capable of neutralizing TNFα with an IC50 of at most about 3.076 nM, as measured by a TNFα neutralization assay, and/or the binding protein is capable of neutralizing PGE2 with an IC50 of at most about 124.8 nM, as measured by a PGE2 neutralization assay; or
(c) the binding protein is capable of binding TNFα and NGF, wherein the binding protein is capable of neutralizing TNFα with an IC50 of at most about 0.673 nM, as measured by a TNFα neutralization assay, and/or the binding protein is capable of inhibiting NGF with an IC50 of at most about 7.455 nM, as measured by a TF-1 cell proliferation bioassay.

40. The binding protein of claim 36, comprising two first polypeptide chains and two second polypeptide chains and four functional target binding sites.

41. The binding protein of claim 36, wherein X1 is any one of SEQ ID NO: 1-31.

42. The binding protein of claim 36, wherein X1 is not CH1 or CL.

43. The binding protein of claim 36, wherein the Fc region is a variant sequence Fc region.

44. The binding protein of claim 36, wherein the Fc region is an Fc region from an IgG1, IgG2, IgG3, IgG4, IgA, IgM, IgE, or IgD.

45. The binding protein of claim 36, wherein the binding protein comprises
(a) a heavy chain constant region comprising a wild type human IgG1 heavy chain sequence; and
(b) a light chain constant region comprising a wild type human kappa or lambda light chain constant region sequence.

46. The binding protein of claim 36, wherein the binding protein comprises
(a) a heavy chain constant region comprising a human IgG1 heavy chain sequence modified by one or more amino acid changes, wherein the changes comprise substitutions at amino acid positions 234 and 235 of the constant region sequence; and
(b) a light chain constant region comprising a wild type human kappa or lambda light chain constant region sequence.

47. The binding protein of claim 36, wherein the binding protein is a crystallized binding protein.

48. A binding protein capable of binding
(a) TNFα and IL-13, comprising a DVD-Ig VH and VL sequence pair from Table 2;
(b) TNFα and PGE2, comprising a DVD-Ig VH and VL sequence pair from Table 3; or
(c) TNFα and NGF, comprising a DVD-Ig VH and VL sequence pair from Table 4.

49. A binding protein conjugate comprising the binding protein of claim 36, the binding protein conjugate further comprising an immunoadhesion molecule, an imaging agent, a therapeutic agent, or a cytotoxic agent.

50. The binding protein conjugate of claim 49, wherein the imaging agent is a radiolabel, an enzyme, a fluorescent label, a luminescent label, a bioluminescent label, a magnetic label, or biotin.

51. The binding protein conjugate of claim 50, wherein the radiolabel is ³H, ¹⁴C, ³⁵S, ⁹⁰Y, ⁹⁹Tc, ¹¹¹In, ¹²⁵I, ¹³¹I, ¹⁷⁷Lu, ¹⁶⁶Ho, or ¹⁵³Sm.

52. The binding protein conjugate of claim 49, wherein the therapeutic or cytotoxic agent is an anti-metabolite, an alkylating agent, an antibiotic, a growth factor, a cytokine, an anti-angiogenic agent, an anti-mitotic agent, an anthracycline, toxin, or an apoptotic agent.

53. An isolated nucleic acid or group of nucleic acids encoding the binding protein of claim 36.

54. A vector comprising the isolated nucleic acid or group of nucleic acids of claim 53.

55. The vector of claim 54, wherein the vector comprises pcDNA, pTT, pTT3, pEFBOS, pBV, NV, pcDNA3.1 TOPO, pEF6, pHybE, TOPO, or pBJ.

56. A host cell comprising the vector of claim 54.

57. The host cell of claim 56, wherein the host cell is a prokaryotic cell, Escherichia coli, a eukaryotic cell, a protist cell, an animal cell, a plant cell, a fungal cell, a yeast cell, an Sf9 cell, a mammalian cell, an avian cell, an insect cell, a CHO cell, or a COS cell.

58. A method of producing a binding protein, comprising culturing the host cell of claim 56 in culture medium under conditions sufficient to produce the binding protein.

59. A pharmaceutical composition comprising the binding protein according to claim 36 and a pharmaceutically acceptable carrier.

60. The pharmaceutical composition of claim 59, further comprising at least one additional therapeutic agent.

61. The pharmaceutical composition according to claim 60, wherein the additional therapeutic agent is an imaging agent, a cytotoxic agent, an angiogenesis inhibitor, a kinase inhibitor, a co-stimulation molecule blocker, an adhesion molecule blocker, an anti-cytokine antibody or functional fragment thereof, methotrexate, cyclosporin, rapamycin. FK506, a detectable label or reporter, a TNF antagonist, an antirheumatic, a muscle relaxant, a narcotic, a non-steroid anti-inflammatory drug (NSAID), an analgesic, an anesthetic, a sedative, a local anesthetic, a neuromuscular blocker, an antimicrobial, an antipsoriatic, a corticosteriod, an anabolic steroid, an erythropoietin, an immunization, an immunoglobulin, an immunosuppressive, a growth hormone, a hormone replacement drug, a radiopharmaceutical, an antidepressant, an antipsychotic, a stimulant, an asthma medication, a beta agonist, an inhaled steroid, an epinephrine or analog, a cytokine, or a cytokine antagonist.

62. A method of treating a subject for a disease or a disorder by administering the binding protein of claim 36 to the subject.

63. The method of claim 62, wherein the disorder is arthritis, osteoarthritis, juvenile chronic arthritis, septic arthritis, Lyme arthritis, psoriatic arthritis, reactive arthritis, spondyloarthropathy, systemic lupus erythematosus, Crohn's disease, ulcerative colitis, inflammatory bowel disease, insulin dependent diabetes mellitus, thyroiditis, asthma, allergic diseases, psoriasis, dermatitis scleroderma, graft versus host disease, organ transplant rejection, acute or chronic immune disease associated with organ transplantation, sarcoidosis, atherosclerosis, disseminated intravascular coagulation, Kawasaki's disease, Grave's disease, nephrotic syndrome, chronic fatigue syndrome, Wegener's granulomatosis, Henoch-Schoenlein purpurea, microscopic vasculitis of the kidneys, chronic active hepatitis, uveitis, septic shock, toxic shock syndrome, sepsis syndrome, cachexia, infectious diseases, parasitic diseases, acute transverse myelitis, Huntington's chorea, Parkinson's disease, Alzheimer's disease, stroke, primary biliary cirrhosis, hemolytic anemia, malignancies, heart failure, myocardial infarction. Addison's disease, sporadic polyglandular deficiency type I and polyglandular deficiency type II. Schmidt's syndrome, adult (acute) respiratory distress syndrome, alopecia, alopecia areata, seronegative arthopathy, arthropathy, Reiter's disease, psoriatic arthropathy, ulcerative colitic arthropathy, enteropathic synovitis, chlamydia, yersinia and salmonella associated arthropathy, spondyloarthopathy, atheromatous disease/arteriosclerosis, atopic allergy, autoimmune bullous disease, pemphigus vulgaris, pemphigus foliaceus, pemphigoid, linear IgA disease, autoimmune haemolytic anaemia, Coombs positive haemolytic anaemia, acquired pernicious anaemia, juvenile pernicious anaemia, myalgic encephalitis/Royal Free Disease, chronic mucocutaneous candidiasis, giant cell arteritis, primary sclerosing hepatitis, cryptogenic autoimmune hepatitis, Acquired Immunodeficiency Syndrome, Acquired Immunodeficiency Related Diseases, Hepatitis B. Hepatitis C, common varied immunodeficiency (common variable hypogammaglobulinaemia), dilated cardiomyopathy, female infertility, ovarian failure, premature ovarian failure, fibrotic lung disease, cryptogenic fibrosing alveolitis, post-inflammatory interstitial lung disease, interstitial pneumonitis, connective tissue disease associated interstitial lung disease, mixed connective tissue disease associated lung disease, systemic sclerosis associated interstitial lung disease, rheumatoid arthritis associated interstitial lung disease, systemic lupus erythematosus associated lung disease, dermatomyositis/polymyositis associated lung disease, Sjögren's disease associated lung disease, ankylosing spondylitis associated lung disease, vasculitic diffuse lung disease, haemosiderosis associated lung disease, drug-induced interstitial lung disease, fibrosis, radiation fibrosis, bronchiolitis obliterans, chronic eosinophilic pneumonia, lymphocytic infiltrative lung disease, postinfectious interstitial lung disease, gouty arthritis, autoimmune hepatitis, type-1 autoimmune hepatitis (classical autoimmune or lupoid hepatitis), type-2 autoimmune hepatitis (anti-LKM antibody hepatitis), autoimmune mediated hypoglycaemia, type B insulin resistance with acanthosis nigricans, hypoparathyroidism, acute immune disease associated with organ transplantation, chronic immune disease associated with organ transplantation, osteoarthrosis, primary sclerosing cholangitis, psoriasis type 1, psoriasis type 2, idiopathic leucopaenia, autoimmune neutropaenia, renal disease NOS, glomerulonephritides, microscopic vasulitis of the kidneys, lyme disease, discoid lupus erythematosus, male infertility idiopathic or NOS, sperm autoimmunity, multiple sclerosis (all subtypes), sympathetic ophthalmia, pulmonary hypertension secondary to connective tissue disease, Goodpasture's syndrome, pulmonary manifestation of polyarteritis nodosa, acute rheumatic fever, rheumatoid spondylitis, Still's disease, systemic sclerosis, Sjögran's syndrome, Takayasu's disease/arteritis, autoimmune thrombocytopaenia, idiopathic thrombocytopaenia, autoimmune thyroid disease, hyperthyroidism, goitrous autoimmune hypothyroidism (Hashimoto's disease), atrophic autoimmune hypothyroidism, primary myxoedema, phacogenic uveitis, primary vasculitis, vitiligo acute liver disease, chronic liver diseases, alcoholic cirrhosis, alcohol-induced liver injury, cholestasis, idiosyncratic liver disease, Drug-Induced hepatitis, Non-alcoholic Steatohepatitis, allergy and asthma, group B streptococci (GBS) infection, mental disorders (e.g., depression and schizophrenia), Th2 Type and Th1 Type mediated diseases, acute and chronic pain (different forms of pain), and cancers such as lung, breast, stomach, bladder, colon, pancreas, ovarian, prostate and rectal cancer and hematopoietic malignancies (leukemia and lymphoma) abetalipoproteinemia, Acrocyanosis, acute and chronic parasitic or infectious processes, acute leukemia, acute lymphoblastic leukemia (ALL), acute myeloid leukemia (AML), acute or chronic bacterial infection, acute pancreatitis, acute renal failure, adenocarcinomas, aerial ectopic beats, AIDS dementia complex, alcohol-induced hepatitis, allergic conjunctivitis, allergic contact dermatitis, allergic rhinitis, allograft rejection, alpha-1-antitrypsin deficiency, amyotrophic lateral sclerosis, anemia, angina pectoris, anterior horn cell degeneration, anti cd3 therapy, antiphospholipid syndrome, anti-receptor hypersensitivity reactions, aordic and peripheral aneuryisms, aortic dissection, arterial hypertension, arteriosclerosis, arteriovenous fistula, ataxia, atrial fibrillation (sustained or paroxysmal), atrial flutter, atrioventricular block, B cell lymphoma, bone graft rejection, bone marrow transplant (BMT) rejection, bundle branch block, Burkitt's lymphoma, burns, cardiac arrhythmias, cardiac stun syndrome, cardiac tumors, cardiomyopathy, cardiopulmonary bypass inflammation response, cartilage transplant rejection, cerebellar cortical degenerations, cerebellar disorders, chaotic or multifocal atrial tachycardia, chemotherapy associated disorders, chromic myelocytic leukemia (CML), chronic alcoholism, chronic inflammatory pathologies, chronic lymphocytic leukemia (CLL), chronic obstructive pulmonary disease (COPD), chronic salicylate intoxication, colorectal carcinoma, congestive heart failure, conjunctivitis, contact dermatitis, cor pulmonale, coronary artery disease, Creutzfeldt-Jakob disease, culture negative sepsis, cystic fibrosis, cytokine therapy associated disorders, Dementia pugilistica, demyelinating diseases, dengue hemorrhagic fever, dermatitis, dermatologic conditions, diabetes, diabetes mellitus, diabetic ateriosclerotic disease, Diffuse Lewy body disease, dilated congestive cardiomyopathy, disorders of the basal ganglia, Down's Syndrome in middle age, drug-induced movement disorders induced by drugs which block CNS dopamine receptors, drug sensitivity, eczema, encephalomyelitis, endocarditis, endocrinopathy, epiglottitis, epstein-barr virus infection, erythromelalgia, extrapyramidal and cerebellar disorders, familial hematophagocytic lymphohistiocytosis, fetal thymus implant rejection, Friedreich's ataxia, functional peripheral arterial disorders, fungal sepsis, gas gangrene, gastric ulcer, graft rejection of any organ or tissue, gram negative sepsis, gram positive sepsis, granulomas due to intracellular organisms, hairy cell leukemia. Hallerrorden-Spatz disease, hashimoto's thyroiditis, hay fever, heart transplant rejection, hemachromatosis, hemodialysis, hemolytic uremic syndrome/thrombolytic thrombocytopenic purpura, hemorrhage, hepatitis A, His bundle arryhthmias, HIV infection/HIV neuropathy, Hodgkin's disease, hyperkinetic movement disorders, hypersensitity reactions, hypersensitivity pneumonitis, hypertension, hypokinetic movement disorders, hypothalamic-pituitary-adrenal axis evaluation, idiopathic Addison's disease, idiopathic pulmonary fibrosis, antibody mediated cytotoxicity, Asthenia, infantile spinal muscular atrophy, inflammation of the aorta, influenza a, ionizing radiation exposure, iridocyclitis/uveitis/optic neuritis, ischemia-reperfusion injury, ischemic stroke, juvenile rheumatoid arthritis, juvenile spinal muscular atrophy, Kaposi's sarcoma, kidney transplant rejection, legionella, leishmaniasis, leprosy, lesions of the corticospinal system, lipedema, liver transplant rejection, lymphederma, malaria, malignamt Lymphoma, malignant histiocytosis, malignant melanoma, meningitis, meningococcemia, metabolic/idiopathic, migraine headache, mitochondrial multi-system disorder, mixed connective tissue disease, monoclonal gammopathy, multiple myeloma, multiple systems degenerations (Mencel Dejerine-Thomas Shy-Drager and Machado-Joseph), myasthenia gravis, mycobacterium avium intracellulare, mycobacterium tuberculosis, myelodyplastic syndrome, myocardial ischemic disorders, nasopharyngeal carcinoma, neonatal chronic lung disease, nephritis, nephrosis, neurodegenerative diseases, neurogenic I muscular atrophies, neutropenic fever, non-hodgkins lymphoma, occlusion of the abdominal aorta and its branches, occulsive arterial disorders, okt3 therapy, orchitis/epidydimitis, orchitis/vasectomy reversal procedures, organomegaly, osteoporosis, pancreas transplant rejection, pancreatic carcinoma, paraneoplastic syndrome/hypercalcemia of malignancy, parathyroid transplant rejection, pelvic inflammatory disease, perennial rhinitis, pericardial disease, peripheral atherlosclerotic disease, peripheral vascular disorders, peritonitis, pernicious anemia, pneumocystis carinii pneumonia, pneumonia, POEMS syndrome (polyneuropathy, organomegaly, endocrinopathy, monoclonal gammopathy, and skin changes syndrome), post perfusion syndrome, post pump syndrome, post-MI cardiotomy syndrome, preeclampsia. Progressive supranucleo Palsy, primary pulmonary hypertension, radiation therapy, Raynaud's phenomenon and disease, Raynoud's disease, Refsum's disease, regular narrow QRS tachycardia, renovascular hypertension, reperfusion injury, restrictive cardiomyopathy, sarcomas, scleroderma, senile chorea, Senile Dementia of Lewy body type, seronegative arthropathies, shock, sickle cell anemia, skin allograft rejection, skin changes syndrome, small bowel transplant rejection, solid tumors, specific arrythmias, spinal ataxia, spinocerebellar degenerations, streptococcal myositis, structural lesions of the cerebellum, Subacute sclerosing panencephalitis, Syncope, syphilis of the cardiovascular system, systemic anaphalaxis, systemic inflammatory response syndrome, systemic onset juvenile rheumatoid arthritis, T-cell or FAB ALL, Telangiectasia, thromboangitis obliterans, thrombocytopenia, toxicity, transplants, trauma/hemorrhage, type III hypersensitivity reactions, type IV hypersensitivity, unstable angina, uremia, urosepsis, urticaria, valvular heart diseases, varicose veins, vasculitis, venous diseases, venous thrombosis, ventricular fibrillation, viral and fungal infections, vital encephalitis/aseptic meningitis, vital-associated hemaphagocytic syndrome, Wernicke-Korsakoff syndrome, Wilson's disease, xenograft rejection of any organ or tissue, acute coronary syndromes, acute idiopathic polyneuritis, acute inflammatory demyelinating polyradiculoneuropathy, acute ischemia, adult Still's disease, anaphylaxis, anti-phospholipid antibody syndrome, aplastic anemia, atopic eczema, atopic dermatitis, autoimmune dermatitis, autoimmune disorder associated with streptococcus infection, autoimmune enteropathy, autoimmune hearing loss, autoimmune lymphoproliferative syndrome (ALPS), autoimmune myocarditis, autoimmune premature ovarian failure, blepharitis, bronchiectasis, bullous pemphigoid, cardiovascular disease, catastrophic antiphospholipid syndrome, celiac disease, cervical spondylosis, chronic ischemia, cicatricial pemphigoid, clinically isolated syndrome (cis) with risk for multiple sclerosis, childhood onset psychiatric disorder, dacryocystitis, dermatomyositis, diabetic retinopathy, disk herniation, disk prolaps, drug induced immune hemolytic anemia, endometriosis, endophthalmitis, episcleritis, erythema multiforme, erythema multiforme major, gestational pemphigoid. Guillain-Barré syndrome (GBS), hay fever, Hughes syndrome, idiopathic Parkinson's disease, idiopathic interstitial pneumonia, IgE-mediated allergy, immune hemolytic anemia, inclusion body myositis, infectious ocular inflammatory disease, inflammatory demyelinating disease, inflammatory heart disease, inflammatory kidney disease, IPF/UIP, iritis, keratitis, keratoconjunctivitis sicca, Kussmaul disease or Kussmaul-Meier disease, Landry's paralysis, Langerhan's cell histiocytosis, livedo reticularis, macular degeneration, microscopic polyangiitis, morbus bechterev, motor neuron disorders, mucous membrane pemphigoid, multiple organ failure, myelodysplastic syndrome, myocarditis, nerve root disorders, neuropathy, non-A non-B hepatitis, optic neuritis, osteolysis, ovarian cancer, pauciarticular JRA, peripheral artery occlusive disease (PAOD), peripheral vascular disease (PVD), peripheral artery, disease (PAD), phlebitis, polyarteritis nodosa (or periarteritis nodosa), polychondritis, polymyalgia rheumatica, poliosis, polyarticular JRA, polyendocrine deficiency syndrome, polymyositis, post-pump syndrome, primary Parkinsonism, prostate and rectal cancer and hematopoietic malignancies (leukemia and lymphoma), prostatitis, pure red cell aplasia, primary adrenal insufficiency, recurrent neuromyelitis optica, restenosis, rheumatic heart disease, sapho (synovitis, acne, pustulosis, hyperostosis, and osteitis), scleroderma, secondary amyloidosis, shock lung, scleritis, sciatica, secondary adrenal insufficiency, silicone associated connective tissue disease, sneddon-wilkinson dermatosis, spondilitis ankylosans, Stevens-Johnson syndrome (SJS), systemic inflammatory response syndrome, temporal arteritis, toxoplasmic retinitis, toxic epidermal necrolysis, transverse myelitis, TRAPS (tumor necrosis factor receptor, type 1 allergic reaction, type II diabetes, usual interstitial pneumonia (UIP), vernal conjunctivitis, viral retinitis, Vogt-Koyanagi-Harada syndrome (VKH syndrome), wet macular degeneration, or wound healing.

64. The method of claim 62, wherein the disorder is an autoimmune disorder, asthma, rheumatoid arthritis, osteoarthritis, systemic lupus erythematosus (SLE), multiple sclerosis, sepsis, a neurodegenerative disease, or an oncological disorder.

65. The method of claim 62, wherein the binding protein is formulated for parenteral, subcutaneous, intramuscular, intravenous, intrarticular, intrabronchial, intraabdominal, intracapsular, intracartilaginous, intracavitary, intracelial, intracerebellar, intracerebroventricular, intracolic, intracervical, intragastric, intrahepatic, intramyocardial, intraosteal, intrapelvic, intrapericardiac, intraperitoneal, intrapleural, intraprostatic, intrapulmonary, intrarectal, intrarenal, intraretinal, intraspinal, intrasynovial, intrathoracic, intrauterine, intravesical, bolus, vaginal, rectal, buccal, sublingual, intranasal, or transdermal administration.

66. A method of determining the presence, amount, or concentration of at least one target or fragment thereof in a test sample by an immunoassay,
wherein the immunoassay comprises contacting the test sample with at least one binding protein and at least one detectable label, and
wherein the at least one binding protein comprises the binding protein of claim 36.

67. The method of claim 66, further comprising:
(i) contacting the test sample with the at least one binding protein, wherein the binding protein binds to an epitope on the target or fragment thereof so as to form a first complex;
(ii) contacting the complex with the at least one detectable label, wherein the detectable label binds to the binding protein or an epitope on the target or fragment thereof that is not bound by the binding protein to form a second complex; and
(iii) detecting the presence, amount, or concentration of the target or fragment thereof in the test sample based on the signal generated by the detectable label in the second complex, wherein the presence, amount, or concentration of the target or fragment thereof is directly correlated with the signal generated by the detectable label.

68. The method of claim 66, further comprising:
(i) contacting the test sample with the at least one binding protein, wherein the binding protein binds to an epitope on the target or fragment thereof so as to form a first complex;
(ii) contacting the complex with the at least one detectable label, wherein the detectable label competes with the target or fragment thereof for binding to the binding protein so as to form a second complex; and
(iii) detecting the presence, amount, or concentration of the target or fragment thereof in the test sample based on the signal generated by the detectable label in the second complex, wherein the presence, amount, or concentration of the target or fragment thereof is indirectly correlated with the signal generated by the detectable label.

69. A kit for assaying a test sample for the presence, amount, or concentration of a target or fragment thereof in the sample, said kit comprising (a) instructions for assaying the test sample for the target or fragment thereof and (b) at least one binding protein comprising the binding protein of claim 36.
